(19) United States
(12) Patent Application Publication
(10) Pub. No.: US 2025/0144168 A1
(43) Pub. Date: May 8, 2025

(54) LANTHIPEPTIDES AND METHODS OF USE

(71) Applicant: OSTIA SCIENCES INC., Toronto (CA)

(72) Inventors: Abdelahhad Barbour, Toronto, ON (CA); Michael Glogauer, Toronto, ON (CA)

(21) Appl. No.: 18/837,439

(22) PCT Filed: Feb. 10, 2023
(86) PCT No.: PCT/CA2023/050180

§ 371 Date: Aug. 9, 2024

Related U.S. Application Data
(60) Provisional application No. 63/308,841, filed on Feb. 10, 2022.

(51) Int. Cl. A61K 38/16; A61P 31/04; C07K 14/315

(52) U.S. Cl. CPC A61K 38/164; A61P 31/04; C07K 14/315

(57) ABSTRACT

Compositions comprising a pre-SrnA1 peptide, an SrnA1 peptide, a pre-SrnA2 peptide, an SrnA2 peptide, a pre-SrnA4 peptide, a SrnA4, and other peptides and post-translationally modified versions thereof are taught. Also taught are methods of treating bacterial infections comprising administering a pharmaceutically acceptable amount of the composition to the patient with a bacterial infection caused by a pathogen from, for example, multi-drug resistant (MDR) Streptococcus pneumoniae, Streptococcus pyogenes, Streptococcus dysagalactiae, vancomycin-resistant Enterococcus faecium, Porphyromonas gingivalis, Tannerella forsythia, and MDR Enterococcus faecalis.

### FIELD OF THE INVENTION

[0001] The invention pertains to novel Salivaricin lanthipeptides, particularly, phosphorylated lanthipeptides, derived from the oral microbiome, and methods of using the same for protection against oral diseases and other indications.

### BACKGROUND OF THE INVENTION

[0002] Bacteria associated with the human host can either be commensals of low virulence or profoundly virulent microorganisms, which can cause extreme disease manifestation and, in many cases, death [1]. The current advancement in molecular microbiology revealed that commensals also produce metabolites that can regulate the host neutrophils and macrophages resulting in better innate immunity responses [2].

[0003] Although considerable research addressing significant microbial processes presently exist, including resistance to antimicrobials, virulence, and colonization, the mechanisms governing commensal-host communication in the oral microbiome and their symbiotic relationship to keep opportunistic pathogens in check remain poorly understood. The human oral microbiota is a dynamic and diverse ecological niche colonizing on distinct microenvironments, including the teeth' hard surfaces and the mucosa's epithelial surfaces [3]. Several processes bear the transition of a homeostatic equilibrium of the oral microbiome to a dysbiosis state. As the oral polymicrobial community evolves, microbial metabolites and host immune response can cause changes to the local environment that facilitate the outgrowth or over-representation of microorganisms associated with a dysbiotic state [4].

[0004] Differences in host immune responses, environmental factors, or nutrition can influence the polymicrobial composition and the meta-transcriptional landscape, which may increase the production of virulence determinants. Once a community has transitioned to a dysbiotic state, the structural stability of functionally specialized components will render the condition to persist for an extended period of time, and oral diseases are often chronic and slowly progressing [5, 6]. To prevent such a scenario, commensal oral microbes, which form the main constituents of the oral biofilm, possess diverse mechanisms to crowd out harmful microbes and communicate with the host cells to produce an immunological response that will result in the prevention of disease progression [7]. One of the earliest colonizers of the oral cavity is Streptococcus salivarius [8], which bestow the establishment of immune homeostasis and management of host inflammatory responses by inhibiting the activation of the NF-β pathway [9]. In addition to immunoregulation capacities, selected strains of this bacterium secrete a tandem array of ribosomally synthesized and post-translationally modified peptides (RiPPs) called salivaricins [10]. Though not conserved in many strains, most salivaricins belong to the lantibiotic class II of antibiotics. The term lanthipeptides is a short-hand denotation for lanthionine-containing peptides, and when lanthipeptides possess antimicrobial activities, we call them lantibiotics [11]. The increase in the bacterial whole genome sequencing projects resulted in increased numbers of characterized lanthipeptides and has led to the realization that their functions extend beyond their antimicrobial activities to now include antifungal [12], antiviral [13, 14] antinociceptive [15], antiallodynic functions [16] and host defense immunomodulation [17, 18].

[0005] Lantibiotics are RiPPs produced through a process that involves the dehydration of selected serine (Ser) and threonine (Thr) residues and the intramolecular addition of cysteine (Cys) thiols to the resulting unsaturated amino acids to produce lanthionine (Lan) and methyllanthionine (MeLan) rings, respectively [19, 20]. Dehydration during biosynthesis of lanthipeptides includes the phosphorylation of Thr and Ser residues by the lanthionine dehydratase enzyme followed by phosphate elimination with anti-stereoselectivity. Phosphorylated lanthipeptides are not observed during in vitro synthesis, suggesting that phosphate elimination is faster than dissociation of the intermediate phosphopeptide [20].

[0006] Novel lanthipeptides may provide advantageous therapeutic properties.

### SUMMARY OF THE INVENTION

[0007] According to one aspect of the invention is provided a composition comprising a pre-SrnA1 peptide having a sequence of SEQ ID NO.: 1, a SrnA1 peptide having a sequence of SEQ ID NO: 2, a pre-SrnA2 peptide having a sequence of SEQ ID NO.3, a SrnA2 peptide having a sequence of SEQ ID NO: 4, a pre-SrnA4 peptide having a sequence of SEQ ID NO.: 7, a SrnA4 peptide having a sequence of SEQ ID NO: 8, or post-translationally modified versions thereof.

[0008] In certain embodiments, the composition consists of SrnA1, SrnA2, and SrnA4, or post-translationally modified versions thereof.

[0009] In certain embodiments, the composition consists of post-translationally modified versions of SrnA1, SrnA2, and SrnA4.

[0010] In certain embodiments, the post translational modifications comprise phosphorylation.

[0011] In certain embodiments, the phosphorylation comprises a phosphorylation at Thr4 amino acid of each or all of SrnA1, SrnA2 and SrnA4.

[0012] In certain embodiments, the post translational modifications comprise a single phosphorylation at Thr4 amino acid of each or all of SrnA1, SrnA2 and SrnA4.

[0013] In certain embodiments, the post-translational modifications comprise one or more dehydrations.

[0014] In certain embodiments, the post-translational modifications comprise dehydrations at one or more of amino acids 9, 19 and 21 of each or all of SrnA1, SrnA2 and SrnA4.

[0015] In certain embodiments, the post-translational modifications comprise a 6-methyllanthionine ring between amino acids 9 and 14 (Abu9-S-Ala14), a 6-methyllanthionine ring between amino acids 19 and 24 (Abu19-S-Ala24), and a lanthionine ring between amino acids 21 and 31 (Ala21-S-Ala31) of each or all of SrnA1, SrnA2 and SrnA4.

[0016] In certain embodiments, the compositions are derived from peptides having sequences of SEQ ID NO:1, SEQ ID NO:3, and/or SEQ ID NO: 7.

[0017] In certain embodiments, the compositions are derived from an S. salivarius.

[0018] In certain embodiments, the compositions are derived from a SALI-10 strain of S. salivarius.

[0019] In certain embodiments, the SALI-10 is characterized by comprising a megaplasmid.

[0020] In certain embodiments, the megaplasmid has a size of 164 kb.

[0021] In certain embodiments, the megaplasmid has a sequence of SEQ ID NO.: 15.

[0022] In certain embodiments, the SALI-10 is characterized by comprising a gene sequence of SEQ ID NO.: 14.

[0023] In certain embodiments, the SALI-10 comprises an SrnM lanthionine synthetase having a sequence of SEQ ID NO:9.

[0024] According to a certain aspect of the present invention is provided a pharmaceutical composition comprising the composition and a pharmaceutically acceptable excipient or carrier.

[0025] According to a certain aspect of the present invention is provided a method of treating a bacterial infection comprising administering a pharmaceutically acceptable amount of the pharmaceutical composition to a patient.

[0026] In certain embodiments, the bacterial infection is caused by a pathogen selected from the group consisting of multi-drug resistant (MDR) Streptococcus pneumoniae, Streptococcus pyogenes, Streptococcus dysagalactiae, vancomycin-resistant Enterococcus faecium, Porphyromonas gingivalis, Tannerella forsythia, and MDR Enterococcus faecalis.

[0027] According to a certain aspect of the present invention is provided a method of treating Actinomyces graevenitzii and/or Granulicatella adiacens-associated pulmonary abscess in a patient in need thereof, comprising administering a pharmaceutically acceptable amount of the pharmaceutical composition to the patient.

[0028] According to a certain aspect of the present invention is provided a method of treating Bifidobacterium dentium associated caries in a patient in need thereof, comprising administering a pharmaceutically acceptable amount of the pharmaceutical composition to the patient.

[0029] According to a certain aspect of the present invention is provided a method of treating of S. pyogenes associated strep throat in a patient in need thereof, comprising administering a pharmaceutically acceptable amount of the pharmaceutical composition to the patient.

[0030] In certain embodiments, the administration is oral and the amount of commensal bacteria in the oral cavity is maintained or augmented.

[0031] According to a certain aspect of the present invention is provided a method of ameliorating oral health in a patient desirous thereof comprising administration of a pharmaceutically acceptable amount of the pharmaceutical composition to the oral cavity of the patient.

[0032] According to a certain aspect of the present invention is provided a method of modifying oral biofilm in an oral cavity of a patient desirous thereof by reducing disease-associated bacteria while maintaining number of essential commensals in said oral cavity, comprising administering a pharmaceutically acceptable amount of the pharmaceutical composition to the oral cavity of the patient.

[0033] According to a certain aspect of the present invention is provided a method of killing biofilm-associated bacteria in an oral cavity of a patient desirous thereof, comprising administering a pharmaceutically acceptable amount of the pharmaceutical composition to the oral cavity of the patient.

[0034] According to a certain aspect of the present invention is provided a method of modulating an anti-inflammatory response in a patient in need thereof, comprising administering a pharmaceutically acceptable amount of the pharmaceutical composition to the patient.

[0035] According to a certain aspect of the present invention is provided a method of reducing oral inflammation in a patient in need thereof, comprising administering a pharmaceutically acceptable amount of the pharmaceutical composition to the patient.

[0036] According to a certain aspect of the present invention is provided a method of modulating an anti-inflammatory response in a patient in need thereof, comprising administering a pharmaceutically acceptable amount of salivaricin peptides to the patient.

[0037] According to a certain aspect of the present invention is provided a method of modulating phagocytic activity of neutrophils of a patient in need thereof, comprising administering a pharmaceutically acceptable amount of the pharmaceutical composition or a salivaricin peptide to the patient.

[0038] According to a certain aspect of the present invention is provided a method of activating reactive oxygen species of neutrophils in a patient in need thereof, comprising administering a pharmaceutically acceptable amount of the pharmaceutical composition or a salivaricin peptide to the patient.

[0039] According to a certain aspect of the present invention is provided a method of activating neutrophil chemotaxis in a patient in need thereof, comprising administering a pharmaceutically acceptable amount of the pharmaceutical composition or a salivaricin peptide to the patient.

[0040] According to a certain aspect of the present invention is provided a method of polarizing macrophages towards M2 anti-inflammatory phenotype in a patient in need thereof, comprising administering a pharmaceutically acceptable amount of the pharmaceutical composition or a salivaricin peptide to the patient.

[0041] According to a certain aspect of the present invention is provided an isolated S. salivarius strain SALI-10 as deposited as NCBI GeneBank accession number PC090008.

[0042] According to a certain aspect of the present invention is provided an isolated S. salivarius strain SALI-10 having a genome sequence of SEQ ID NO: 14.

[0043] According to a certain aspect of the present invention is provided an isolated S. salivarius strain SALI-10 having a megaplasmid sequence of SEQ ID NO: 15.

[0044] According to a certain aspect of the present invention is provided an isolated S. salivarius strain comprising an SrnM having a sequence of SEQ ID NO:9.

[0045] According to a certain aspect of the present invention is provided an isolated S. salivarius strain expressing a peptide SrnA1 having a sequence of SEQ ID NO: 2, a peptide SrnA2 having a sequence of SEQ ID NO: 4, a peptide SrnA4 having a sequence of SEQ ID NO: 8, or post-translationally modified versions thereof.

[0046] In certain embodiments, the post translational modifications comprise phosphorylation.

[0047] In certain embodiments, the phosphorylation comprises a phosphorylation at Thr4 of each or all of SrnA1, SrnA2 and SrnA4.

[0048] In certain embodiments, the post translational modifications comprise a single phosphorylation at Thr4 of each or all of SrnA1, SrnA2 and SrnA4.

[0049] In certain embodiments, the post-translational modifications comprise three dehydrations and one phosphorylation.

[0050] In certain embodiments, the post-translational modifications consist of three dehydrations and one phosphorylation.

[0051] In certain embodiments, the post-translational modifications comprise dehydrations at one or more of amino acids 9, 19 and 21 of each or all of SrnA1, SrnA2 and SrnA4.

[0052] In certain embodiments, the post-translational modifications comprise a β-methyllanthionine ring between amino acids 9 and 14 [Abu9-S-Ala14], a β-methyllanthionine ring between amino acids 19 and 24 [Abu19-S-Ala24], and a lanthionine ring between amino acids 21 and 31 [Ala21-S-Ala31], and a phosphorylation at amino acid 4 (Thr4) of each or all of SrnA1, SrnA2 and SrnA4.

### BRIEF DESCRIPTION OF FIGURES

[0053] FIG. 1 shows a genetic map of pSALI-10 megaplasmid encoding for the production of salivaricin 10 peptides in strain S. salivarius SALI-10.

[0054] FIG. 2 shows the sequence similarity and abundance analysis of the (srn) lanthipeptides system. FIG. 2a: protein similarity map of the lanthionine dehydratase enzyme (SrnM) of strain S. salivarius SALI-10. FIG. 2b: peptide similarity network of the lanthipeptides 4 precursors of the srn operon. FIG. 2c: heatmap for one cluster detected for CGFP analysis of SrnM enzyme using a library of 180 metagenomes from six body sites from healthy individuals.

[0055] FIG. 3 summarizes the genetics and proteomics in salivaricin 10 production. FIG. 3a shows a bioactivity assay with the S. salivarius SALI-10 wild-type compared to the delta srn variant. FIG. 3b shows a schematic representation of the srn operon encoding for salivaricin 10 peptides' biosynthesis. FIG. 3c shows the colony mass spectrometry profile of salivaricin 10 producer strain SALI-10 (Black) and plasmid negative variant (gray).

[0056] FIG. 4 shows the Structural analysis of Salivaricin 10. FIG. 4a, HR-MS/MS of the SrnA1 (Phenylalanine-variant) peptide containing three dehydrations. FIG. 4b, HR-MS/MS of the SrnA2 (Tyrosine-variant) peptide containing three dehydrations. FIG. 4c, NMR assignment of a threonine at position 4.

[0057] FIG. 5 summarizes the bactericidal activity and mode of action of salivaricin 10. FIGS. 5a and 5b shows the killing curve of salivaricin 10. FIG. 5c shows the membrane depolarization activities of nisin A and salivaricin 10 against M. luteus measured using DiOC2(3) fluorescence. FIG. 5d shows Sytox green uptake measurement of membrane permeability activity of salivaricin 10 against M. luteus. FIG. 5e shows the intracellular accumulation of the cell wall precursor UDP-MurNAc-pentapeptide. In FIG. 5f, UDP-MurNAc-pentapeptide was identified by mass spectrometry.

[0058] FIG. 6 shows the Antibiofilm activity of salivaricin 10. FIG. 6a, is a schematic of the process. FIG. 6b shows modulation of multispecies biofilm by salivaricin 10 towards commensal-rich microbiome. FIG. 6c shows sum projections of Z-stack images taken by confocal microscopy. A dark black signal indicates viable live cells (Syto 9), a lighter gray signal indicates damaged/dead cells (propidium iodide), viable signal intensity (FIG. 6d) and ratio of viable signal to dead signal (FIG. 6e) were measured by image J. FIG. 6f: The heterogeneity of bacterial distribution (roughness) was measured by viable signal intensity of each pixel using image J. g, Thickness of biofilm was measured after z-stack images from lower part of biofilm to highest part of biofilm (highest signal intensity).

[0059] FIG. 7 shows results indicating that Salivaricin 10 augments neutrophils and macrophages priming in human blood and mice bone marrow and induce phagocytosis in vitro. During phagocytosis, salivaricin 10 induced CD markers expression in human neutrophils (FIG. 7a) and macrophages (FIG. 7b). Salivaricin 10 also induced phagocytosis and increased the number of phagocytic cells of neutrophils (FIG. 7c) and macrophages (FIG. 7d). Mice bone marrow neutrophils were also primed by salivaricin 10 with induction of CD markers CD66a, CD55 and CD11b (FIG. 7e) and increase in phagocytosis activity (FIG. 7f).

[0060] FIG. 8 shows results of polarization assays. Salivaricin 10 polarizes monocytes towards M2 pro-resolution phenotype. Thp1 monocytes were differentiated with LPS+INF-γ, in the presence or absence of Salivaricin 10 (Sal10). The peptides were found to block M1 polarization, while promoting expression of pro-resolution (M2) macrophage markers (FIG. 8g). In FIG. 8, the gray line shows cells stimulated with IFN and LPS (M1); the black line shows cells stimulated with IFN, LPS and then salivaricin 10 to alter polarization. FIGS. 8a, c, and e show analysis of CD40, CD163 and CD206 respectively. FIGS. 8b, d, f: representative flow spectrum of each CD marker.

[0061] FIG. 9 summarizes the findings evidencing that Salivaricin 10 improve phagocytosis in vivo. FIG. 9a, pHrodo E. coli BioParticles conjugates were injected concomitantly with either PBS or salivaricin 10 into the peritoneal cavity. FIG. 9b, percentage of phagocytic neutrophils. FIG. 9c, total signal of phagocytosis in neutrophils.

[0062] FIG. 10 shows that Salivaricin 10 induce ROS production by neutrophils and act as neutrophils chemoattractant. FIG. 10a, neutrophils isolated from human blood were exposed to salivaricin 10 at different concentrations. Ros production was induced by salivaricin 10 at a dose dependent manner.

[0063] FIG. 10b, a repeated experiment of (a) using neutrophils isolated from bone marrow of mice. FIG. 10c, chemotaxis assay of neutrophils using isolated human neutrophils. Salivaricin 10 concentration at 1 μg produced the highest movement speed.

[0064] FIG. 11 shows TOCSY 60 ms NMR Spectrum of a combined HPLC fraction of salivaricin 10 phenylalanine and tyrosine variants in DMSO-d6 recorded at proton frequency of 850 MHz.

[0065] FIG. 12 shows NOESY 500 ms NMR Spectrum of a combined HPLC fraction of salivaricin 10 phenylalanine and tyrosine variants in DMSO-d6 recorded at proton frequency of 850 MHz.

[0066] FIG. 13 shows the characterization of SrnA4 precursor. FIG. 13a, HR-MS/MS of the SrnA4 peptide. FIG. 13b, SrnA4 mass showing the 2, 3 and 4 charged ions.

[0067] FIG. 14 shows a Pairwise Sequence Alignment of srnM lanthionine synthetase of strain SALI10 (SEQ ID NO: 9) and JH (SEQ ID NO: 10), with mutations highlighted.

[0068] FIG. 15 shows the immunomodulatory effects of the phosphorylated N-terminal tail of salivaricin 10. FIG. 15a—chemotaxis assay of isolated human neutrophils. Salivaricin 10 was used as chemoattractant and the neutrophil movement speed was monitored. FIG. 15b, Phosphorylated [p(1-8) Sali10], and non-phosphorylated [np(1-8) Sali10] were chemically synthesized and tested in the neutrophil chemotaxis assay at 40 μg/mL. The data shows that phosphate removal resulted in a drastic reduction in neutrophil chemotaxis (p<0.0001), fMLP was used as chemotaxis positive control. FIG. 15c, gene expression data show that phosphorylation is important to downregulate CXCL10 gene associated with M1 macrophages. However, authentic salivaricin 10 showed stronger suppression. FIG. 15d, p(1-8) Sali10 upregulated the gene expression of TGM2 associated with M2 anti-inflammatory macrophages. However, there was no statistically significant difference in the TGM2 gene expression compared with cells treated with the non-phosphorylated analogue. The concentration of peptides used in the gene expression assay was 40 μg/mL. (*)=p<0.05, (**)=p<0.01, (***)=p<0.001. (****)=p<0.0001.

### DETAILED DESCRIPTION

[0069] A culture collection of 78 different S. salivarius strains isolated from healthy human adults was screened for the production of inhibitory activities against periodontal disease-associated pathogens and also antibiotic resistant/upper-respiratory tract microorganisms. We found that, while most isolates failed to inhibit P. gingivalis and T. forsythia, extracts from our novel strain S. salivarius SALI-10 were found to have particularly strong capacity to inhibit the growth of these targets. SALI-10 produced the antibacterial substances under nutrient-rich conditions and mostly on semi-solid agar surfaces, and less production was observed in liquid cultures. We have found that SALI-10's novel inhibitory activity is attributed to novel lanthipeptides produced by this strain, encoded on a megaplasmid.

[0070] Evidencing this, megaplasmid curing of strain SALI-10 indeed resulted in a new strain SALI-10-PSaLI10 lacking the characteristic inhibitory activity. Whole genome sequencing on S. salivarius SALI-10 revealed the presence of one lanthipeptide encoding operon (srn) harbored on a 164 kb megaplasmid, submitted as NCBI GenBank accession number CP090008 (incorporated herein by reference). The complete DNA sequence of the SALI-10 genome is shown as SEQ ID NO:14. The complete DNA sequence of the SALI-10 megaplasmid is shown as SEQ ID NO:15. FIG. 1 shows the genetic map of pSALI-10 megaplasmid encoding for the production of salivaricin 10 peptides in strain S. salivarius SALI-10. BLAST was performed against other megaplasmids encoding other lantibiotics salivaricins production in S. salivarius strains K12, M18, NU10 and YU10. The srn operon responsible for the production of the lanthipeptides is shown and include characteristic class II LanM dehydratase, response regulator and histidine kinase, putative self-immunity genes and ABC transporter. Salivaricin 10 peptides precursor translated in silico are shown in the top left of FIG. 1, the gray sequence is the leader peptide, and the black sequence is

(srnA1 full peptide SEQ ID NO: 1:
MAKNTSRPEIDSLSFEVENQELSGKSGSGWFTAVQLTLAGRCGRWFTGSFECTTNNVKCG; srnA1 mature peptide
SEQ ID NO: 2: GWFTAVQLTLAGRCGRWFTGSFECTTNNVKCG; srnA2 full peptide SEQ ID NO: 3:
MRKNNNRKEIDTLDFEVKNQELSGKSGSGWFTAVQLTLAGRCGRWFTGSYECTTNNVKCG; srnA2 mature
peptide SEQ ID NO: 4: GWFTAVQLTLAGRCGRWFTGSYECTTNNVKCG; srnA3 full peptide SEQ ID NO: 5:
MKSKKVNTEIDTLEFEIDNQELNGTSGSGWWYTAFKMTLAGRCGLCFTCSYECTTNNVHC; srnA3 mature peptide
SEQ ID NO: 6: GWWYTAFKMTLAGRCGLCFTCSYECTTNNVHC; srnA4 full peptide SEQ ID NO: 7:
MKQDNFEIDSLDYEINSQELNGKSAAGWSTAVRLTVQGRCGWWFTHSYECTSPNVRCG; srnA4 mature peptide
SEQ ID NO: 8: GWSTAVRLTVQGRCGWWFTHSYECTSPNVRCG).

[0071] As shown in FIG. 1, the srn operon in strain SALI-10 harbored all necessary genes for the production of 4 ribosomally synthesized and posttranslationally modified peptides.

[0072] We have found that the lanthionine synthetase enzyme is an important component of the post-translation modification process to produce the bioactive polycyclic lanthipeptides. To determine the phylogenetic distribution of SrnM enzyme, a sequence similarity network was constructed with the Enzyme Function Initiative Enzyme Similarity Tool (EFI-EST)[21] utilizing all members of the lanthionine synthetase family from the UniProtKB database. The relative similarity between individual enzymes was performed with Cytoscape[22] at an alignment score threshold of 130. Actinobacteria constitute the majority of the enzyme sequences found in the UniProtKB database, with one primary cluster and another smaller one. The analysis also identified one Cyanobacteria cluster and two Proteobacteria clusters. Multiple small-size Firmicutes clusters resulted from this analysis, with one specific group containing only oral streptococci, including the species S. salivarius, S. mitis, S. oralis and S. pneumoniae. This separate cluster showed no close linkage to any other group and contained strains encoding for SrnM enzyme, suggesting that SrnM is specifically attributed to lanthipeptides synthesized in the oral cavity (FIG. 2-a). Four mutations within the srnM gene were identified in strain SALI-10 compared to that reported for salivaricin E in strain JH (FIG. 14; SrnM of SALI10 is shown as SEQ ID NO:9; SrnM of JH is shown as SEQ ID NO: 10), which can results in different posttranslation modifications. Similar approach was applied on the SrnA peptide precursors. Database search on SrnA1, SrnA2, SrnA3 and SrnA4 at an identification cut-off of 65% also showed that these peptides were unique to the oral streptococci group (FIG. 2-b). We used chemically guided functional profiling (CGFP) to map SrnM enzyme abundance in a library of 180 different metagenomes from different body sites using sequence similarity networks generated by the EFI-EST web tool. Abundance quantitation of SrnM enzyme among metagenomic databases revealed that this enzyme is primarily found on the buccal mucosa, tongue dorsum and supragingival plaque, respectively (FIG. 2-c). Other body sites including the gastrointestinal tract and anterior nares showed less hits suggesting that this enzyme and its operon are unique to bacteria colonizing the oral cavity. Biosynthetic gene clusters encoding for secondary metabolites production are conserved in most Actinobacteria genera including Streptomyces but are relatively rare in the human microbiome. The srn operon was almost exclusively found in oral streptococcal strains and it encodes for the production of a combination of lanthipeptides modified by one class II lanthionine dehydratase enzyme (LanM).

[0073] FIG. 2 shows the sequence similarity and abundance analysis of the (srn) lanthipeptides system. FIG. 2a shows the protein similarity map of the lanthionine dehydratase enzyme (SrnM) of strain S. salivarius SALI-10. Each node represents one protein sequence, each edge represents BLASTP E-values cut-off of 1E-130. FIG. 2b shows the peptide similarity network of the lanthipeptides 4 precursors of the srn operon. Each node represents one peptide sequence, each edge represents BLASTP with similarity cut of 65%. The sequence similarity networks were generated using the Enzyme Similarity Tool-Enzyme Function Initiative (EST-EFI, https://efi.igb.illinois.edu/efi-est/) and visualized in Cytoscape (v.3.9.0). FIG. 2c shows the heatmap for one cluster detected for CGFP analysis of SrnM enzyme using a library of 180 metagenomes from six body sites from healthy individuals. The detected cluster is displayed on the y-axis, the body sites on the x-axis. The bar on the right defines the color key for the “gene copies per microbial genome”.

### Salivaricin 10: A Novel Combination of Phosphorylated Lanthipeptides

[0074] The antibacterial activity of the producer strain S. salivarius SALI-10 was enriched by isopropanol extraction of cells grown on agar plates. To access milligram quantities of each compound, the biosynthesis was induced by supplementing agar cultures of the strain S. salivarius SALI-10 with crude extracts prepared from previous uninduced cultures of the same producer. A megaplasmid-cured mutant was generated from the SALI-10 strain, which was shown to have lost antimicrobial activity (FIG. 3-a). Reverse phase ultra-performance liquid chromatography equipped with positive electrospray ionization time-of-flight mass spectrometry (RP-UPLC-ES+-TOF-MS) revealed obvious differences between mass spectra of cell extracts from SALI-10 wild-type and megaplasmid-cured mutant (SALI-10^{-PSaLI10}). As demarcated in FIG. 3-c, three products were not present in the cured mutant.

[0075] FIG. 3 summarizes the genetics and proteomics in salivaricin 10 production. FIG. 3a shows a bioactivity assay with the S. salivarius SALI-10 wild-type, the Δsrn variant strain (−PSaLI10) was tested as a negative control, and it lacks srn locus responsible for producing salivaricin 10 peptides. Both SALI-10 and Δsrn variant strains were spotted on the surface of Tryptic Soy Agar plates and grew for 18 hours before overlaying with a sensitive bacterial target. Inhibition zone of no target bacteria growth is observed as a result of the antibacterial action of salivaricin 10. Salivaricin 10 deficient strain could not inhibit the target bacteria. FIG. 3b shows a schematic representation of the srn operon encoding for salivaricin 10 peptides' biosynthesis. The operon contains genes represent 4 peptide precursors to be ribosomally synthesized, genes with putative self-immunity role, genes involved in histidine kinase regulation and sensitizing, a gene encodes the lanthipeptides modification enzyme, a gene encodes lanthipeptide transporter and a gene with likely a peptide isomerase function. FIG. 3c shows the colony mass spectrometry profile of salivaricin 10 producer strain SALI-10 (black) and plasmid negative variant (gray). Cell extracts were compared by reversed-phase UPLC-TOF-MS-ES+. The three peptides composing salivaricin 10 are indicated in a dashed box.

[0076] The two antimicrobial products eluting between 5.8 and 6.0 minutes (FIG. 3-c) were found to have a monoisotopic mass determined by high-resolution, accurate-mass spectrometry (HRMS) of 3551.58 Da and 3535.58 Da, respectively. The masses differed by the presence of a tyrosine or phenylalanine at position 22 in the core peptide sequence. The less-inhibitory peptide eluting at 5.3 minutes (FIG. 3-c) showed a monoisotopic mass of 3669.60 Da (FIG. 13).

[0077] Interestingly, the peptides were larger than the predicted mass according to the peptide sequence. High-resolution mass spectrometry (HRMS) on the two most inhibitory peptides (SrnA1 and SrnA2) revealed that the products were all phosphorylated, and further non-phosphorylated variants were not observed (Tables 1, 2, 3, 4). The data also showed that the peptides did not undergo more than three dehydrations and that the peptides contained primarily two or three dehydrations (Tables 2 and 4). The chemical formula for each peptide containing three dehydrations was found to be C₁₅₅H₂₂₇N₄₄O₄₄S₃P₁ (SrnA1 (phe-variant); Theoretical ([M+3H]/3)³⁺: m/z 1,179.53; Observed ([M+3H]/3)³⁺: m/z 1,179.53; mass error: −0.61 [p.p.m]), C₁₅₅H₂₂₇N₄₄O₄₅S₃P₁ (SrnA2 (tyr-variant); Theoretical ([M+3H]/3)³⁺: m/z 1,184.86; Observed ([M+3H]/3)³⁺: m/z 1,184.86; mass error: 1.78 [p.p.m.]), C₁₆₀H₂₂₉N₄₈O₄₅S₃P₁ (SrnA4); Theoretical ([M+4H]/4)⁴⁺: m/z 918.40; Observed ([M+4H]/4)⁴⁺: m/z 918.40; mass error: −2.43 [p.p.m]) The molecular formulas and masses of all three peptides did not correspond to any known salivaricin structures.

TABLE 1
Salivaricin 10 non-phosphorylated phenylalanine-variant. No mass ions
were detected for such a variant containing zero, one, two, three
of four dehydrations are present in the isolated HPLC fraction.

| | | | | m/z | m/z | m/z |
|---|---|---|---|---|---|---|
| Dehydration | Phosphate | Charge | Area | (Expected) | (Observed) | (ppm) |
| 0 | 0 | [M + 1H] | 0 | 3510.6504 | 0 | 0 |
| 0 | 0 | [M + 2H] | 0 | 1755.8288 | 0 | 0 |
| 0 | 0 | [M + 3H] | 0 | 1170.8883 | 0 | 0 |
| 0 | 0 | [M + 4H] | 0 | 878.4181 | 0 | 0 |
| 1 | 0 | [M + 1H] | 0 | 3492.6398 | 0 | 0 |
| 1 | 0 | [M + 2H] | 0 | 1746.8236 | 0 | 0 |
| 1 | 0 | [M + 3H] | 0 | 1164.8848 | 0 | 0 |
| 1 | 0 | [M + 4H] | 0 | 873.9154 | 0 | 0 |
| 2 | 0 | [M + 1H] | 0 | 3474.6293 | 0 | 0 |
| 2 | 0 | [M + 2H] | 0 | 1737.8183 | 0 | 0 |
| 2 | 0 | [M + 3H] | 0 | 1158.8813 | 0 | 0 |
| 2 | 0 | [M + 4H] | 0 | 869.4128 | 0 | 0 |
| 3 | 0 | [M + 1H] | 0 | 3456.6187 | 0 | 0 |
| 3 | 0 | [M + 2H] | 0 | 1728.813 | 0 | 0 |
| 3 | 0 | [M + 3H] | 0 | 1152.8778 | 0 | 0 |
| 3 | 0 | [M + 4H] | 0 | 864.9101 | 0 | 0 |
| 4 | 0 | [M + 1H] | 0 | 3438.6081 | 0 | 0 |
| 4 | 0 | [M + 2H] | 0 | 1719.8077 | 0 | 0 |
| 4 | 0 | [M + 3H] | 0 | 1146.8742 | 0 | 0 |
| 4 | 0 | [M + 4H] | 0 | 860.4075 | 0 | 0 |

TABLE 2
Salivaricin 10 phosphorylated phenylalanine-variant. M + 3H
and M + 4H charged ions with the expected masses were detected
for a phosphorylated product containing one, two, or three dehydrations
(primarily two and three dehydration based on area counts). Observed
masses are within 10 ppm of expected mass.

| | | | | m/z | m/z | m/z |
|---|---|---|---|---|---|---|
| Dehydration | Phosphate | Charge | Area | (Expected) | (Observed) | (ppm) |
| 0 | 1 | [M + 1H] | 0 | 3590.6167 | 0 | 0 |
| 0 | 1 | [M + 2H] | 0 | 1795.812 | 0 | 0 |
| 0 | 1 | [M + 3H] | 0 | 1197.5438 | 0 | 0 |
| 0 | 1 | [M + 4H] | 0 | 898.4096 | 0 | 0 |
| 1 | 1 | [M + 1H] | 0 | 3572.6062 | 0 | 0 |
| 1 | 1 | [M + 2H] | 0 | 1786.8067 | 0 | 0 |
| 1 | 1 | [M + 3H] | 7176560 | 1191.5402 | 1191.537 | −2.7298 |
| 1 | 1 | [M + 4H] | 5287632 | 893.907 | 893.9048 | −2.4777 |
| 2 | 1 | [M + 1H] | 0 | 3554.5956 | 0 | 0 |
| 2 | 1 | [M + 2H] | 0 | 1777.8014 | 0 | 0 |
| 2 | 1 | [M + 3H] | 49422948 | 1185.5367 | 1185.5323 | −3.6872 |
| 2 | 1 | [M + 4H] | 32836691 | 889.4044 | 889.4015 | −3.2277 |
| 3 | 1 | [M + 1H] | 0 | 3536.585 | 0 | 0 |
| 3 | 1 | [M + 2H] | 0 | 1768.7962 | 0 | 0 |
| 3 | 1 | [M + 3H] | 18672655 | 1179.5332 | 1179.5325 | −.6098 |
| 3 | 1 | [M + 4H] | 11700963 | 884.9017 | 884.9017 | .0151 |
| 4 | 1 | [M + 1H] | 0 | 3518.5745 | 0 | 0 |
| 4 | 1 | [M + 2H] | 0 | 1759.7909 | 0 | 0 |
| 4 | 1 | [M + 3H] | 0 | 1173.5297 | 0 | 0 |
| 4 | 1 | [M + 4H] | 0 | 880.3991 | 0 | 0 |

TABLE 3
Salivaricin 10 non-phosphorylated tyrosine-variant. No ions with the expected
masses were detected for such a variant containing zero, one, two, three
of four dehydrations are present in the isolated HPLC fraction.

| | | | | m/z | m/z | m/z |
|---|---|---|---|---|---|---|
| Dehydration | Phosphate | Charge | Area | (Expected) | (Observed) | (ppm) |
| 0 | 0 | [M + 1H] | 0 | 3526.6453 | 0 | 0 |
| 0 | 0 | [M + 2H] | 0 | 1763.8263 | 0 | 0 |
| 0 | 0 | [M + 3H] | 0 | 1176.22 | 0 | 0 |
| 0 | 0 | [M + 4H] | 0 | 882.4168 | 0 | 0 |
| 1 | 0 | [M + 1H] | 0 | 3508.6347 | 0 | 0 |
| 1 | 0 | [M + 2H] | 0 | 1754.821 | 0 | 0 |
| 1 | 0 | [M + 3H] | 0 | 1170.2164 | 0 | 0 |
| 1 | 0 | [M + 4H] | 0 | 877.9141 | 0 | 0 |
| 2 | 0 | [M + 1H] | 0 | 3490.6242 | 0 | 0 |
| 2 | 0 | [M + 2H] | 0 | 1745.8157 | 0 | 0 |
| 2 | 0 | [M + 3H] | 0 | 1164.2129 | 0 | 0 |
| 2 | 0 | [M + 4H] | 0 | 873.4115 | 0 | 0 |
| 3 | 0 | [M + 1H] | 0 | 3472.6136 | 0 | 0 |
| 3 | 0 | [M + 2H] | 0 | 1736.8105 | 0 | 0 |
| 3 | 0 | [M + 3H] | 0 | 1158.2094 | 0 | 0 |
| 3 | 0 | [M + 4H] | 0 | 868.9089 | 0 | 0 |
| 4 | 0 | [M + 1H] | 0 | 3454.6031 | 0 | 0 |
| 4 | 0 | [M + 2H] | 0 | 1727.8052 | 0 | 0 |
| 4 | 0 | [M + 3H] | 0 | 1152.2059 | 0 | 0 |
| 4 | 0 | [M + 4H] | 0 | 864.4062 | 0 | 0 |

TABLE 4
Salivaricin 10 phosphorylated tyrosine-variant. M + 3H and M + 4H
charged ions with the expected masses were detected for a phosphorylated product
containing one, two, or three dehydrations (primarily two and three dehydration
based on area counts). Observed masses are within 10 ppm of expected mass.

| | | | | m/z | m/z | m/z |
|---|---|---|---|---|---|---|
| Dehydration | Phosphate | Charge | Area | (Expected) | (Observed) | (ppm) |
| 0 | 1 | [M + 1H] | 0 | 3606.6116 | 0 | 0 |
| 0 | 1 | [M + 2H] | 0 | 1803.8095 | 0 | 0 |
| 0 | 1 | [M + 3H] | 0 | 1202.8754 | 0 | 0 |
| 0 | 1 | [M + 4H] | 0 | 902.4084 | 0 | 0 |
| 1 | 1 | [M + 1H] | 0 | 3588.6011 | 0 | 0 |
| 1 | 1 | [M + 2H] | 0 | 1794.8042 | 0 | 0 |
| 1 | 1 | [M + 3H] | 1514273 | 1196.8719 | 1196.8679 | −3.3087 |
| 1 | 1 | [M + 4H] | 825589 | 897.9057 | 897.905 | −.8483 |
| 2 | 1 | [M + 1H] | 0 | 3570.5905 | 0 | 0 |
| 2 | 1 | [M + 2H] | 0 | 1785.7989 | 0 | 0 |
| 2 | 1 | [M + 3H] | 23771360 | 1190.8684 | 1190.8716 | 2.7140 |
| 2 | 1 | [M + 4H] | 16384948 | 893.4031 | 893.4056 | 2.7967 |
| 3 | 1 | [M + 1H] | 0 | 3552.58 | 0 | 0 |
| 3 | 1 | [M + 2H] | 0 | 1776.7936 | 0 | 0 |
| 3 | 1 | [M + 3H] | 32714476 | 1184.8648 | 1184.8669 | 1.7836 |
| 3 | 1 | [M + 4H] | 21941586 | 888.9004 | 888.9026 | 2.4850 |
| 4 | 1 | [M + 1H] | 0 | 3534.5694 | 0 | 0 |
| 4 | 1 | [M + 2H] | 0 | 1767.7883 | 0 | 0 |
| 4 | 1 | [M + 3H] | 0 | 1178.8613 | 0 | 0 |
| 4 | 1 | [M + 4H] | 0 | 884.3978 | 0 | 0 |

[0078] To access milligram quantities of the peptides, the biosynthesis was induced by supplementing agar cultures of the strain S. salivarius SALI-10 with nanomolar quantities of crude extracts prepared from previous uninduced cultures of the same producer. Cultivation of the induced cultures in semi-solid media led to the production of strong inhibitory activity which could be purified by consecutive steps of chloroform extraction, C18 solid phase extraction, and C18 reversed phase HPLC. The pure compounds exhibited exactly the same masses as determined for the compounds from the wild-type strain SALI-10 and was named salivaricin 10.

[0079] High-resolution, accurate-mass tandem mass spectrometry (MS/MS) was performed to identify the region of the peptide that was phosphorylated. Given that all peptide variants were phosphorylated, the threonine residues at positions 4, 25, and 26 were considered as likely sites for phosphorylation. MS/MS on the ([M+3H]/3)³⁺ ions observed in the HRMS data for the SrnA1 and SrnA2 products containing three dehydrations and were analyzed to determine the site/s of phosphorylation. The higher energy collisional dissociation (HCD)-based fragmentation of these ions is shown in Error! Reference source not found.-a,b. The fragment b and y ions provided evidence for Thr4 to be the phosphorylation site on the SrnA1 (phe-variant) and SrnA2 (tyr-variant) peptides. Assigned b ions between m/z 474.21 and m/z 772.39 had masses corresponding to a single dehydration, while the masses m/z 1140.86 (SrnA1, Phe variant) and m/z 1146.20 (SrnA2, Tyr variant) correspond to four dehydrations. The assigned y ion measuring m/z 1773.72 (SrnA2, Tyr variant) corresponds to two dehydrations. The y ions between m/z 1277.58-1483.21 (phe-variant) and the m/z 1342.12-1532.73 (tyr-variant) correspond to three dehydrations, while the y ions between m/z 1524.72-1146.87 (phe-variant) and the m/z 1606.26-1152.21 (tyr-variant) correspond to four dehydrations. Given that the ion used for MS/MS had only three dehydrations and a phosphate, the observation of an additional dehydration was due to the loss of phosphate. When the phosphate dissociates during fragmentation, the fragment is observed as a dehydrated product. In all cases, there were no additional ions to support the presence of the phosphate in any other location within the peptide, such as Thr25 and Thr26. The proposed lanthionine ring formations in SrnA1 (Phe-variant) and SrnA2 (Try-variant) occur between a dehydrated threonine (Dhb) at position 9 and a cysteine at position 14. The masses observed and the HCD-induced MS/MS fragmentation pattern for both the SrnA1 (Phe-variant) and SrnA2 (Tyr-variant) support the proposed assignment of the lanthionine rings. There were no observable fragment ions, within the acceptable limits, within the regions spanned by the proposed thioether linkages. Two-dimensional NMR analyses confirmed that Thr5 is not a dehydrated Dhb residue, supporting that the dehydration is due to the loss of phosphate in the MS/MS experiments (Error! Reference source not found.-c). Nuclear Overhauser effects (NOEs) provided sequential walk assignments (i+1) for the N-terminal linear peptide region of the SrnA1 (Phe-variant) and SrnA2 (Tyr-variant) products. The proton chemical shift values for Gly1-Trp2-Phe3-Thr4-Ala5-Val6-Gln7-Leu8 were provided in Table 5, below. The assigned spin system for Thr4 (8.18 ppm [NH], 4.34 ppm [Hα], 4.14 ppm [Hβ], and 1.05 ppm [Hγ]) was clearly indicative that it is not a dehydrated Dhb residue and the observed loss of water in the MS/MS data at this position is therefore due to the loss of the phosphate.

[0080] FIG. 4 shows the Structural analysis of Salivaricin 10. a, HR-MS/MS of the SrnA1 (Phenylalanine-variant) peptide containing three dehydrations. b, HR-MS/MS of the SrnA2 (Tyrosine-variant) peptide containing three dehydrations. The ions with a signal/noise (s/n) greater than 5.0 were used for assignments and all but one ion for each peptide had less than 10 ppm mass difference from expected and observed masses (Tables 6 and 7). The masses m/z 1121.89 (SrnA1, Phe variant) and m/z 1127.21 (SrnA2, Tyr variant) had the correct isotopic ratios for the corresponding peptides and the C13 isotopes were within the acceptable 10 ppm limits. b and y ions are labeled above and below amino acids respectively. c, NMR assignment of a threonine at position 4. A sequential walk from the alpha and beta protons on the phosphorylated threonine to the amide spine system of alanine at position 5. The alpha and beta protons for Thr4 are shifted downfield due to the presence of a phosphate. NOESY spectra and TOCSY spectra are show in gray and black, respectively.

TABLE 5
Proton Chemical Shift Values for Salivaricin
10 N-terminal linear peptide (Gly1 to Leu8).

| Amino | | | | |
|---|---|---|---|---|
| Acid | HN | Hα | Hβ | Other |
| Gly1 | n.d. | 4.24 | | |
| Trp2 | 8.04 | 4.55 | 3.07, 2.89 | Hδ1 7.08, Hε1 10.86, Hε3 7.31, |
| | | | | Hζ2 7.21 Hζ3 6.68 |
| Phe3 | 8.29 | 4.71 | 2.99, 2.86 | Hδ1, Hδ2, Hε1, Hε2, Hζ1 7.24 |
| Thr4 | 8.18 | 4.44 | 4.13 | Hγ2 1.05 |
| Ala5 | 7.89 | 4.31 | 1.41 | |
| Val6 | 8.05 | 4.26 | 1.90, 1.73 | Hγ 0.84 |
| Gln7 | 7.98 | 4.49 | 2.12 | Hγ2 and Hγ3 n.d., Hε21 7.21, |
| | | | | Hε22 6.9 |
| Leu8 | 7.98 | n.d. | 1.42 | Hγ n.d, Hδ 0.87 |

n.d. Values were not detected or were not assignable due to peak overlap

TABLE 6
Fragment ions of SrnA1 peptide.

| b ions | | | y ions | | |
|---|---|---|---|---|---|
| Observed | Charge | Δm/z (ppm) | Observed | Charge | Δm/z (ppm) |
| 474.21 | +1 | −6.65 | 1277.58 | +2 | −6.25 |
| 545.25 | +1 | −10.12 | 1334.12 | +2 | −4.76 |
| 644.32 | +1 | −9.39 | 1398.16 | +2 | −7.70 |
| 772.38 | +1 | −4.14 | 1447.68 | +2 | −2.21 |
| 1121.89 | +3 | −24.61 | 1483.21 | +2 | −8.10 |
| 1140.86 | +3 | −3.45 | 1524.72 | +2 | −5.78 |
| | | | 1065.84 | +3 | −9.05 |
| | | | 1146.87 | +3 | −7.02 |

TABLE 7
Fragment ions of SrnA2 peptide.

| b ions | | | y ions | | |
|---|---|---|---|---|---|
| Observed | Charge | Δm/z (ppm) | Observed | Charge | Δm/z (ppm) |
| 474.21 | +1 | −3.94 | 1773.72 | +1 | 3.18 |
| 545.25 | +1 | −5.10 | 1342.12 | +2 | −10.46 |
| 644.32 | +1 | −3.35 | 1406.16 | +2 | −9.25 |
| 1127.21 | +3 | 18.66 | 1455.69 | +2 | −5.95 |
| 1146.20 | +3 | −7.39 | 1491.21 | +2 | −8.35 |
| | | | 1532.73 | +2 | −9.54 |
| | | | 1606.26 | +2 | −7.62 |
| | | | 1071.17 | +3 | −3.64 |
| | | | 1152.21 | +3 | −7.97 |

TABLE 8
Fragment ions of SrnA4 peptide.

| b ions | | | y ions | | |
|---|---|---|---|---|---|
| | | Δm/z | | | Δm/z |
| Observed | Charge | (ppm) | Observed | Charge | (ppm) |
| 244.10 (b2) | +1 | −0.81 | 645.30 (y6) | +1 | −6.19 |
| 396.16 (b4) | +1 | 0.25 | 732.34 (y7) | +1 | −4.36 |
| 467.20 (b5) | +1 | −6.20 | 1297.53 (y12) | +1 | 1.46 |
| 945.96 (b17) | +2 | −2.43 | 717.80 (y13) | +2 | 3.76 |
| 1061.02 (b19) | +2 | 4.42 | 1517.61 (y14) | +1 | −7.70 |
| 941.77 (b25) | +3 | 8.22 | 925.89 (y16) | +2 | 3.34 |
| 1041.15 (b28) | +3 | 9.43 | 907.40 (y24) | +3 | 10.35 |
| 1074.16 (b29) | +3 | 4.93 | 1417.12 (y25) | +2 | −2.62 |
| 844.89 (b30) | +4 | −11.24 | 997.12 (y26) | +3 | 5.51 |
| 870.65 (b31) | +4 | 2.87 | 1053.82 (y28) | +3 | 3.79 |
| | | | 1081.50 (y29) | +3 | 0.92 |
| | | | 1104.51 (y30) | +3 | 4.16 |
| | | | 875.15 (y31) | +4 | 0.10 |

### Salivaricin 10 Activity Against Major Oral Pathogens and Primary Mode of Action

[0081] Salivaricin 10 was found to have a potent antimicrobial activity against a wide range of Gram-positive bacteria, including opportunistic pathogen such as MDR Streptococcus pneumonia, Streptococcus pyogenes, Streptococcus dysagalactiae, vancomycin-resistant Enterococcus faecium and multi-drug resistant Enterococcus faecalis clinical isolates. Interestingly, the spectrum of antibacterial activity of salivaricin 10 includes a number of Gram-negative diseases-associated pathogens including P. gingivalis, T. forsythia and Neisseria gonorrhea. Minimal inhibitory concentration (MIC) values of salivaricin 10 were found to be in the micromolar range (0.125-64 μg ml⁻¹, for Gram-positive bacteria) and (32-64 μg ml⁻¹, for Gram-negative bacteria) demonstrating high potency (show in Table 9, below). Salivaricin 10 was bactericidal against targeted bacteria including those tested in time killing assay like S. pyogenes and E. faecalis. E. faecalis was tested here as one of the main targets of salivaricin 10 since this bacterium contains membrane vesicles (MVs) that possess unique lipid and protein profiles, distinct from the intact cell membrane and are enriched in lipoproteins. E. faecalis MVs contribute to antimicrobial resistance and host immune evasion[23]. Salivaricin 10 rapidly reduced the number of E. faecalis cells upon exposure of 2 hours. The killing kinetics was logarithmic after 2, 4 and 6 hours of exposure. Total killing of E. faecalis cells was observed after 24 hours of exposure. S. pyogenes cells, on the other hand were completely killed after 4 hours of exposure without any cells re-grown after 24 hours of exposure. This was clear evidence of the bactericidal activity of salivaricin 10, as summarized in FIG. 5, which summarizes the bactericidal activity and mode of action of salivaricin 10. FIGS. 5a and 5b showed the killing curve of salivaricin 10, as follows. Incubation of either E. faecalis or S. pyogenes with a 10×MIC of salivaricin 10 led to complete killing of the inoculum after 24 h. Data represent medians±s.d. of three independent experiments. FIG. 5c shows the membrane depolarization activities of nisin A and salivaricin 10 against M. luteus measured using DiOC2(3) fluorescence.

[0082] Antimicrobials were added after 2 minutes. FIG. 5d shows Sytox green uptake measurement of membrane permeability activity of salivaricin 10 against M. luteus. Antimicrobials were added after 10 minutes. FIG. 5e shows the intracellular accumulation of the cell wall precursor UDP-MurNAc-pentapeptide. Whole cells of M. luteus were treated with salivaricin 10 at 5× or 10×MIC. Untreated and vancomycin treated (10×MIC) cells were used as controls. UPLC-MS analyzed the accumulated cell wall precursor on negative mode, retention times shift due to the order of magnitude changes in concentration. In FIG. 5f, UDP-MurNAc-pentapeptide was identified by mass spectrometry as indicated by the peaks at m/z 1,149.3511 ([M−H]− ion) and m/z 573.6752 ([M−2H]²⁻ ion).

TABLE 9
Activity of salivaricin 10 against pathogenic microorganisms.

| | | Antibiotic | Salivaricin |
|---|---|---|---|
| Organism | Strain | resistance profile | 10 MIC (μg/mL) |
| M. luteus | ATCC10240 | NA | 0.125 |
| S. pyogenes | W51503011 | CLI-ERY (R) | 16 |
| S. pyogenes | W80908630 | CLI-ERY (S) | 16 |
| S. agalactiae | W73106655 | CLI-ERY (R) | 16 |
| S. agalactiae | W70407881 | CLI-ERY (S) | 32 |
| S. | V4122578 | CRO-CLI-DOX-ERY- | 0.5 |
| pneumoniae | | LVX-MXF (R) | |
| S. | W81002644 | OXA-PENIV-SXT (R) | 1 |
| pneumoniae | | | |
| E. faecalis | W82000259 | QD-TET-ERY (R) | 32 |
| E. faecalis | W80909324 | QD-TET-ERY (S) | 32 |
| E. faecalis | ATCC29212 | NA | 16 |
| E. feacium | W97542221 | VAN (R) | 64 |
| S. mutans | UA159 | NA | >64 |
| N. | V3091967 | CIP (R) | 64 |
| gonorrhoeae | | | |
| P. gingivalis | ATCC33277 | NA | 16 |
| T. forsynthia | ATCC43037 | NA | 32 |

(R): resistant,
(S): sensitive,
NA: not available.
CLI: clindamycin,
ERY: erythromycin,
CRO: ceftriaxone,
DOX: doxycycline,
LVX: levofloxacin,
MXF: moxifloxacin,
OXA: oxacillin,
PENIV: penicillin
V, SXT: Trimethoprim/Sulfamethoxazole,
QD: quinupristin/dalfopristin,
TET: tetracycline,
VAN: vancomycin,
CIP: ciprofloxacin.

### Activity Against Saliva-Derived Multispecies Biofilms

[0083] The bioactivity of salivaricin 10 against saliva-derived multispecies biofilms was established using both 16S rRNA gene sequencing and confocal microscopy. Salivaricin 10 improved total Firmicutes and Proteobacteria numbers in the multispecies biofilm while suppressing Actinobacteria and Bacteroidetes (FIG. 6-b). Salivaricin 10 treatment diminished pulmonary abscess-associated bacteria, Actinomyces graevenitzii and Granulicatella adiacens, and the opportunistic cariogen Bifidobacterium dentium. Species related to the genus Prevotella were also reduced in numbers together with pathogenic streptococci like S. pyogenes. Unlike nisin A treatment, commensals species related to the genera Veillonella, Streptococcus, and Haemophilus enriched after salivaricin 10 treatment with the two tested concentrations (25 μg and 50 μg). Dental health is usually associated with a more significant proportion of streptococcal cells of beneficial characteristics such as S. gordonii, S. sanguinis and S. parasanguinis[24]. S. gordonii, S. parasanguinis were strongly inhibited by nisin exposure and were maintained at normal levels upon salivaricin 10 treatment (FIG. 6-c). These commensal streptococci were usually associated with good oral health, and their decreased colonization is associated with the progression of periodontal disease [25]. They also produce hydrogen peroxide (H₂O₂) to outcompete cariogenic pathogens [26]. Data presented here suggest that salivaricin 10, can modify the oral biofilm by reducing disease-associated bacteria while maintaining the number of essential commensals for a balanced oral microbiome. Such modulation may enable a better immune response and eventually reduce oral inflammation. Unlike salivaricin 10, nisin A disrupted the indigenous oral biofilm, including beneficial commensals using its broader spectrum of antimicrobial activity; this is one of the main problems hindering nisin A development to maintain a balanced oral microbiome.

[0084] Biofilms were formed ex-vivo using cell-free saliva as a medium and total salivary cell as inoculum (from healthy subjects). Twenty-four hours pre-formed multispecies biofilms grown anaerobically were treated with either nisin A (50 μg·ml⁻¹) or two concentrations of salivaricin 10 (25 and 50 μg·ml⁻¹) for a time exposure of 20 min. Upon treatment with salivaricin 10 (at both tested concentrations), like nisin A control, the confocal microscopy images confirmed significant and critical damage to the biofilm architecture. Salivaricin 10 penetrated saliva-derived multispecies biofilms and effectively killed the bacterial cells within (labeled with PI, lighter gray). No such effect was noticed with untreated (PBS) biofilms controls where the viable cells labeled mainly with Syto9, black. the ratio of live to dead cells decreased by a factor of 6 times compared to PBS treated conditions. Compared with PBS controls, salivaricin 10 at concentration of 50 μg·ml⁻¹ but not 25 μg·ml⁻¹ caused a reduction in the overall biofilm thickness. This dose-dependent reduction in the oral biofilm thickness was reported previously for nisin A [27]. Interestingly, the heterogeneity of bacterial distribution (roughness) measured by viable signal intensity of each pixel of the confocal microscopy images showed a 2-fold decrease upon treatment with salivaricin 10 compared to PBS, which indicates less variation in the distribution of bacteria within biofilms.

[0085] FIG. 6 summarizes the antibiofilm activity of salivaricin 10. FIG. 6a shows a schematic of the process followed. Collected saliva samples from healthy subjects were cultured in 24 imaging well plates to grow oral biofilms. The biofilms were treated with either PBS, nisin A or salivaricin 10 followed by washing steps as mentioned in the method section. The biofilms were then scraped off the wells and suspended in PBS to create an inoculum which was used to inoculate fresh BHI medium (1:100). The new sub-cultures were incubated overnight, and the grown cells were collected followed by DNA extraction and 16S rRNA gene sequencing using illumine MiSeq. In a duplicate experiment, Live/Dead molecular probes were used to determine killing effect of salivaricin 10 against pre-formed saliva-derived multispecies biofilm. Live cells stained with Syto 9 while dead (permeabilized) cells are labeled with (PI). FIG. 6b illustrates that salivaricin 10 modulate the multispecies biofilm towards commensal-rich microbiome. Salivaricin 10 improved total Firmicutes and Proteobacteria numbers while reduced Bacteroidetes significantly. 16S rRNA gene analysis at species level shows that salivaricin 10 maintained the number of commensal oral microbiota such as species related to the genera Veillonella, Haemophilus, Streptococcus while reduced Prevotella, Actinomyces and pathogenic streptococci. FIG. 6c shows representations of sum projections of Z-stack images taken by confocal microscopy. A dark black signal indicates viable live cells (Syto 9), a lighter gray signal indicates damaged/dead cells (propidium iodide). d, ratio of viable signal to dead signal was measured by Image J. e, Thickness of biofilm was measured after z-stack images from lower part of biofilm to highest part of biofilm (highest signal intensity). f, the heterogeneity of bacterial distribution (roughness) was measured by viable signal (bacteria labeled with Syto 9) intensity of each pixel using ImageJ.

### Salivaricin 10 Primes Innate Immune Cells to Augment Phagocytosis and Produce Anti-Inflammatory Response

[0086] Neutrophils and monocytes display different activation states characterized by expression levels of cell surface CD marker in the oral cavity depending on the bacteria that they are interacting with. In health, neutrophils in the oral cavity are in a parainflammatory state, and with dysbiosis neutrophil phenotypes change towards a proinflammatory state [28, 29]. To determine if salivaricin 10 can prime neutrophils to augment pathogen elimination through phagocytosis, the surface expression of specific activation CD markers was assessed on human and murine neutrophils stimulated either with pHrodo (pH-sensitive, heat killed E. coli) alone or with salivaricin 10 and pHrodo. A phagocytosis assay was performed on whole blood neutrophils and monocytes (from human) and bone marrow suspension (from mice) and compared PBS and salivaricin 10 stimulation capacity both in presence of the same concentration of pHrodo. Salivaricin 10, concentration used 50 μg·ml⁻¹, upregulated surface expression of CD66, CD18, CD14, CD64 and CD63 in neutrophils (FIG. 7-a), CD66, CD18 and CD63 in monocytes (FIG. 7-b). In addition, phagocytosis by neutrophils and monocytes increased significantly with salivaricin 10 (FIGS. 7-c and d). Mice bone marrow neutrophils were also primed by salivaricin 10 in the phagocytosis assay and CD markers CD11b, CD55 and CD66a were upregulated together with induction in the fold increase in phagocytosis per neutrophil (pHrodo fluorescence) (FIG. 7-e) but not the total number of phagocytic cells (FIG. 7-f).

[0087] To evaluate if salivaricin 10 can directly interact with macrophages, thp1 monocytes were polarized in vitro to a pro-inflammatory, M1 phenotype. The addition of salivaricin 10 in cell culture media was found to reverse the polarization and promoted a pro-resolution, M2 phenotype (high CD206 and CD163). FIG. 8 summarizes the results, which show that Salivaricin 10 polarizes monocytes towards M2 pro-resolution phenotype. Thp1 monocytes were differentiated with LPS+INF-γ, in the presence or absence of Salivaricin 10 (Sal10). The peptides were found to block M1 polarization, while promoting expression of pro-resolution (M2) macrophage markers (g). In FIG. 8, the gray line shows cells stimulated with IFN and LPS (M1); the black line shows cells stimulated with IFN, LPS and then salivaricin 10 to alter polarization. FIGS. 8a, c, and e show analysis of CD40, CD163 and CD206 respectively. FIGS. 8b, d, f: representative flow spectrum of each CD marker.

[0088] We investigated whether salivaricin 10 injection into the peritoneum alters the phagocytic activity of macrophages and neutrophils in the peritoneal lavage. pHrodo E. coli BioParticles conjugates were injected concomitantly with either PBS or salivaricin 10, and phagocytosis was assessed after 3 hours. Salivaricin 10 administration increased the phagocytic activity per neutrophil and the number of phagocytic positive neutrophils in mice compared to PBS-treated control animals (p<0.05).

### Salivaricin 10 Modulates the Phagocytic Activity of Peritoneal Neutrophils

[0089] We investigated whether salivaricin 10 injection into the peritoneum alters the phagocytic activity of macrophages and neutrophils in the peritoneal lavage. pHrodo E. coli BioParticles conjugates were injected concomitantly with either PBS or salivaricin 10, and phagocytosis was assessed after 3 hours. Salivaricin 10 administration increased the phagocytic activity per neutrophil and the number of phagocytic positive neutrophils in mice compared to PBS-treated control animals (p<0.05).

[0090] FIG. 9 summarizes the results: Salivaricin 10 improve phagocytosis in vivo. FIG. 9a, pHrodo E. coli BioParticles conjugates were injected concomitantly with either PBS or salivaricin 10 into the peritoneal cavity. FIG. 9b, percentage of phagocytic neutrophils. FIG. 9c, total signal of phagocytosis in neutrophils.

### Salivaricin 10 is a Neutrophil Activator of Reactive Oxygen Species (ROS) and Chemotaxis

[0091] Salivaricin 10 was found to activate ROS production in a concentration dependent manner in both human and murine neutrophils (FIG. 10-a,b). Neutrophils produce ROS at the site of infection following activation of surface receptors, the produced ROS then cross the bacterial pathogens membranes and damage their nucleic acids, proteins, and cell membranes[30]. Formylated peptides are an important neutrophil chemoattractant associated with bacterial pathogens. These peptides can activate innate immune cells by binding to formyl peptide receptors (FPR) to stimulate chemotaxis and phagocytosis towards pathogens. Salivaricin 10 induced immunomodulatory activities in neutrophils; further, phosphorylated lanthipeptides of salivaricin 10 were found to be neutrophils chemoattractants. Chemotaxis assay with isolated human neutrophils were performed, and neutrophil migration speed due to addition of increasing concentration of salivaricin 10 was measured. The control peptide used in this assay, N-formyl-methionyl-leucyl-phenylalanine (fMLP), induced neutrophils chemotaxis to ˜11 μm/minute. Salivaricin 10 showed similar effect with all concentrations tested (2.5, 5, 10 and 20 μg). Noteworthy, salivaricin 10 at a concentration of 5 μg induced a 2-fold increase in speed compared to ƒMLP (FIG. 10-c).

### Acyclic Phosphorylated N-Terminal Peptide of Salivaricin 10 Contains Important Immunomodulation Activities

[0092] To test whether the phosphorylated N-terminal tail of SrnA1 and SrnA2 is important for the observed immunomodulatory activity, we synthesized the eight N-terminal unbridged residues NH₂-GWFTAVQL-COOH, with the phosphorylated (pThr4) (SEQ ID NO: 16). This short peptide analogue, named p (1-8) Sali10 (SEQ ID NO: 16), induced chemotaxis by neutrophils with very similar activity to the full-length salivaricin 10 (FIG. 15b), supporting the importance of the N-terminal tail in sensitizing neutrophils. The chemotaxis of neutrophils treated with a non-phosphorylated analogue of the N-terminal tail [np(1-8) Sali10] was significantly reduced, suggesting that the phosphate group at position 4 (pThr4) is important for the observed immunomodulatory activity. We also found that both full-length salivaricin 10 and p(1-8) Sali10 (SEQ ID NO: 16), but not the non-phosphorylated np (1-8) Sali10, downregulated the gene expression of the C—X—C motif ligand-10 gene (CXCL10), which is one of the main biomarkers of M1 pro-inflammatory macrophages (Figure. 15c). Both full-length salivaricin 10 and p(1-8) Sali10 (SEQ ID NO: 16) peptides, but not np (1-8) Sali10, upregulated the gene expression of TGM2,M2 anti-inflammatory macrophage biomarker, significantly compared to M1 (control cells) (Figure. 15d). However, there was no significant difference in the gene expression of TGM2 between p (1-8) Sali10 (SEQ ID NO: 16) and np (1-8) Sali10 peptide treatments. Neither p (1-8) Sali10 (SEQ ID NO: 16) nor np (1-8) Sali10 showed effects on the neutrophils' CD marker expression, unlike full-length salivaricin 10, suggesting that the full length or a component of the full peptides is very important for stimulating these other immunomodulatory activities. The data provides strong evidence that the N-terminal 8 amino acids of salivaricin 10, particularly the unique phosphorylated threonine residue (pThr4), are important for the immunomodulatory properties of this lanthipeptide.

### Discussion

[0093] RiPPs are a growing class of natural products with drug-like characteristics. Salivaricin 10 is a phosphorylated tripeptide system composed of lanthipeptides with antibacterial, antibiofilm and immunomodulatory activities produced by the SALI-10 S. salivarius strain. Phosphorylated lanthipeptides from wild-type bacterial strains have not been reported previously, although phosphorylation is common in signal-transducing proteins in prokaryotes and eukaryotes. The salivaricin 10 synthetase, SrnM-10, catalyzes three dehydrations and three cyclization reactions in the pre-salivaricin peptides. SrnM-10 incorporates one phosphate into the salivaricin 10 peptides via phosphorylation reaction during Ser/Thr dehydration.

[0094] We observed higher molecular weights (˜+80 Da) of salivaricin 10 peptides than predicted, suggesting that all the three lanthipeptides are phosphorylated. This was confirmed by NMR and high-resolution MS/MS data as one phosphate was observed during structural analysis. This can be explained by the unique sequence of SrnM-10 (i.e. the SrnM gene of SALI-10), which is responsible for phosphorylation and phosphate elimination. The in-silico analysis of translation of the srnM-10 gene revealed four mutations in the resultant translated protein (SrnM-10 protein, SEQ ID NO:9) compared to the srnM gene reported for other S. salivarius strains. These mutations include Ser5 (SrnM-10)/P5 (SrnM-JH), Met590 (SrnM-10)/Ile590 (SrnM-JH), Thr712 (SrnM-10)/Ala712 (SrnM-JH) and Phe739 (SrnM-10)/Ala739 (SrnM-JH). Four of these mutations are within the C-terminal domain of the SernM enzyme anticipated to be responsible for cyclization. Interestingly, the phosphorylation retained excellent antimicrobial activity for salivaricin 10.

[0095] Noteworthy, the amino acid composition of the three lanthipeptides did affect the overall antimicrobial activity. The major peptide (SrnA2) produced a more extensive zone of inhibition against a lantibiotic-sensitive target, M. luteus. The activity was reduced with SrnA1, which only differed in one amino acid at position 22 compared with SrnA2. Reduced antimicrobial activity was detected for the third peptide, SrnA4, (in isolation) compared with SrnA1 and SrnA2.

[0096] Homologue genes encoding the three peptides of salivaricin 10 were previously found in an S. pneumoniae strain P174 with limited antimicrobial activity [DOI: https://doi.org/10.1128/mBio.01656-15]. Functional analysis of the genes harbored on the S. pneumoniae chromosome was carried out by gene knockout and complementation study. It was shown that deletion of any of the three genes would result in abolished antimicrobial activities. On the contrary, the HPLC-purified peptides of salivaricin 10 in the current study showed distinct antimicrobial functions. This can indicate that the peptides produced by S. pneumoniae strain P174 were not successfully post-translationally modified to induce distinct bioactivities.

[0097] While S. salivarius SALI-10 is the first bacterial strain to produce the three peptides successfully, S. salivarius JH strain was reported previously to produce one peptide, named salivaricin E, sharing the same amino acid sequence of peptide 1 of salivaricin 10 of the current study. Salivaricin E was reported to possess antimicrobial activity against Streptococcus mutans, and to have a molecular weight of 3565.9 Da (with four dehydrations) [DOI: 10.1099/mic.0.000237]. This mass is 112 Da higher than the predicted 3454 Da of successfully translated peptide with four dehydrated residues. Noteworthy, pairwise sequence alignment of the SrnM-10 lanthionine synthetases of strains SALI-10 and JH showed four mutations.

[0098] Since the commensal S. salivarius produces all three peptides, we called it a tri-peptide system, and we tested this composition in all downstream applications. Salivaricin 10 was able to penetrate saliva-derived biofilms and kill bacterial cells within.

[0099] The dental biofilm consists of bacteria embedded in a proteinaceous and polysaccharide-rich matrix, and these biological barriers make it difficult for therapeutic agents to penetrate and reach the targeted bacterial cells. The biofilm's bacterial constituents high resistance to host immune responses and antimicrobials, complicating treatments and sometimes leading to life-threatening conditions [31]. Salivaricin 10 has an ability to penetrate oral biofilms and kill bacteria within by pore formation.

[0100] The protective potential of salivaricin 10 may include a symbiotic relationship with innate immunity that promotes the host defense by enhancing phagocytic activity of neutrophils and macrophages and fostering a more rapid clearance of the bacterial load resulting in faster inflammation resolution. This may be further mediated by the peptide as we have shown that the peptide encourages M2 macrophage differentiation. Bacterial pathogens have evolved biological tools to avoid detection by innate immunity first-line responders. For instance, the oral and systemic pathogen P. gingivalis suppresses macrophage immune functions by synergizing with C5a (a protein fragment released from cleavage of complement component C5 by protease C5-convertase) to increase cyclic adenosine monophosphate (cAMP) concentrations [32]. Moreover, the significant human pathogen S. pyogenes can persist into the host upper-respiratory-tract by circumventing the host defence mechanisms to exploit the inflammatory response. Such mechanisms enable S. pyogenes to survive in phagocytic neutrophils and take advantage of the leukocyte trafficking to be transported and spread from primary sites of infection or even expressing DNase to degrade neutrophil extracellular traps (NETs) [34]. Other oral pathogens like S. pneumoniae can evade neutrophils phagocytosis by activating NF-κB via its cell wall anchoring protein PfbA [35]. Salivaricin 10 not only inhibits S. pyogenes and S. pneumoniae potently by direct killing but also acts as a potent neutrophil chemoattractant to improve recruitment of phagocytic cells and cooperate with the innate immune response for pathogen clearance. There is increasing interest in developing antibiotics as neutrophil chemoattractant in order to increase antimicrobial efficacy.

[0101] In summary, the results of this study show for the first time that phosphorylated lanthipeptides from the commensal oral microbiome can confer multi-level protection to the host against bacterial infections. Salivaricin 10 peptides can act as antibiotics and antibiofilm agents and induce immunomodulatory effects by communicating with innate immune cells that regulate anti-inflammatory and pro-resolution responses. Phosphorylation of salivaricin 10 is required to induce effective neutrophil chemotaxis and for its regulation of inflammation resolution through M2 macrophage differentiation. The phosphorylated mature form of the salivaricin 10 peptides sets them apart from all other lanthipeptides studied to date. Our study sets the stage for future development of salivaricin 10 as an oral antimicrobial therapeutic that has multiple distinct bioactivities, i.e., penetrating biofilms, killing pathogens while sparing commensal streptococci, and stimulating inflammation and its resolution.

### Methods

### 1. Isolation and Screening of Bacteriocin-Producing Strains.

[0102] Clinical isolates of S. salivarius were obtained either from saliva or from the dorsum surface of the tongue of healthy subjects using sterile cotton swabs. The samples were serially diluted in phosphate buffer saline (PBS) at pH 7 before plating on Mitis Salivarius Agar (Difco) followed by incubation at 37° C. with 5% CO₂ in air to grow S. salivarius colonies selectively. The inclusion criteria of the subjects included in this study are as follows; a) healthy, b) 18-30 years old, c) males and females. Exclusion criteria included a) subjects with dental problems e.g., tooth decay and periodontal diseases, b) subjects with upper respiratory tract infections, c) subjects with anemia and d) subjects with a sore throat. Typical morphological S. salivarius colonies grown on MSA were picked using sterile inoculation loops and used to inoculate 5 mL of Tryptic Soy Broth (Difco) supplemented with 0.8% Yeast Extract (Difco). The cultures were allowed to grow at the same incubation conditions mentioned above before glycerol stocks (final concentration 15% glycerol) were made and stored at −80° C. Screening for bacteriocin production was performed using deferred antagonism assay as mentioned previously using Group A Streptococcus, Group B Streptococcus, Streptococcus mutans, Streptococcus oralis and Micrococcus leutus as the targeted indicator strains. Strains exhibiting inhibitory activity against at least one indicator were considered as bacteriocin producers. Colony PCR was performed on all isolated strains using gtfK primers for S. salivarius identification and sets of primers to screen for most common salivaricins A, B, 9, G32 and streptin as mentioned previously [38]. Strains which are negative to the screened salivaricins but still show potent inhibitory activity were selected for further analysis to simplify the purification process of less characterized bacteriocins e.g., salivaricin E. Strains with potent antimicrobial activity against the indicator strains were selected for further peptide extraction and inhibitory spectrum analysis using a panel of antibiotic resistant strains (Table 9).

2. Complete Genome Sequencing of S. salivarius SALI-10.

[0103] S. salivarius SALI-10 was grown in 35 mL BHI (difco) using the same conditions mentioned above. The cells were collected by centrifugation at 4,000×g and resuspended in 5 mL TE buffer. The suspension was combined with lysozyme at a final concentration of 15 mg and incubated at 37° C. for 1 h. Six hundred microliters of EDTA and 100 μL proteinase K (QIAGEN™, USA) were then added to the suspension and incubated again at 37° C. for 1 h. Seven hundred microliters of 12% SDS were then added to the suspension and incubated at 50° C. for 2 h on an orbital shaker (150 rpm). Cold potassium acetate was added, and the sample was centrifuged at 14,000×g for 15 min. The supernatant was collected and combined with RNAse A (final concentration 50 μg/mL) and incubated at 37° C. for 1 h. One volume of cold isopropanol was added to the sample to precipitate the intact high molecular genomic DNA, which was fished out using a glass rod. The DNA was washed with 70% EtOH and dissolved in PCR-grade EDTA-free water. Purified genomic DNA was quantified using the TapeStation™ DNA system (Agilent, Canada). The DNA library was prepared according to Pacific Biosciences 20-kb template preparation protocol using the BluePippin™ size-selection system. Qualified genomic DNA was fragmented using the Covaris g-TUBE device and then end-repaired to prepare SMRTbell™ DNA template libraries (with a fragment size of 15 kb to 50 kb). Complete genome sequencing was performed using a PacBio Sequel II, Single Molecule, Real-Time (SMRT) 8M sequencing (The Centre for Applied Genomics, The Hospital for Sick Children, Canada) using 15 hours movie time to ensure complete genome sequencing with no gaps. Raw BAM files were used for the genome assembly using hierarchical genome-assembly process (HGAP) for high-quality de novo microbial genome assemblies [39]. Genome annotation was carried out by the SEED and the Rapid Annotation of microbial genomes using Subsystems Technology (RAST) [40].

### 3. Identification of Biosynthetic Gene Cluster (BGS).

[0104] The complete genome of S. salivarius SALI-10 obtained by PacBio sequencing was screened by antiSMASH secondary metabolite genome mining pipeline, bacterial version [41]. The complete genome of SALI-10 was as follows: (SEQ ID NO:14: genome; SEQ ID NO: 15: megaplasmid):

### 4. Strain Fermentation and Purification of the Salivaricin 10 Peptides.

[0105] Pure and homogenized SALI-10 colonies were selected to inoculate 10 ml of TSB supplemented with 2% yeast extract. The fermentation was carried out overnight at 37° C. with 5% CO₂ for 18 h. The produced culture was used to inoculate 20 Petri dishes (100 mm), each containing 20 mL of TSA supplemented with 2% yeast extract and 0.2% CaCO₃ and incubated as mentioned above (step 1). The agar cultures were then cut into small pieces and put into 250 mL centrifugation bottles. The bottles were incubated at −80° C. for 18 h and thawed immediately in a 70° C. water bath to produce liquid material. The liquid material was then collected by centrifugation, and the resultant supernatant was extracted with one volume of chloroform. The white precipitate from chloroform extraction was dried and resuspended in 2 ml of 35% acetonitrile in water (v/v). Centrifugation was performed to remove insoluble material to produce a clear peptide extract (we call it material A). The process was repeated with induction procedure by adding 50 μl of material A to 50 ml of TSB supplemented with yeast extract and inoculating this media with SALI-10 strain by repeating step 1 and generating 300 induced agar cultures instead of 20. The induced and chloroform extracted peptide was dried as in step 1 and resuspended in 20 ml of 35% ACN in water (v/v) supplemented with 0.1% TFA. The peptides preparation was processed via solid-phase extraction using C18 Sep-Pak® column (Waters, USA) prewashed with methanol and water. After loading the peptides sample, the column was washed with 10 mL of increasing methanol concentrations (10%, 30%, 50%, 70%). Active peptides were eluted with 95% methanol supplemented with 0.1% TFA. The peptides were finally purified using HPLC and C18-Reversed Phase chromatography as mentioned previously [42]. Eluted fractions (1 ml per minute) were tested for antimicrobial activity against the sensitive strain M. luteus ATCC10240 using the spot-on-lawn method.

### 5. Identification and Characterization of Salivaricin 10 Peptides.

[0106] Initial mass determination of the peptide products prepared either from cell extracts or semi-purified peptide preparation was performed using electrospray ionization quadrupole time of flight mass spectrometry (ESI-QTOF-MS) with a Xevo G2-XS mass spectrometer (Waters, Mississauga, ON, Canada). The raw data were processed using a MassLynx software system (Waters, Mississauga, ON, Canada).

[0107] The liquid chromatography-tandem mass spectrometry (LC-MS/MS) system used on the purified products was comprised of a Shimadzu Nexera X2 MP Ultrahigh-Performance Liquid Chromatography system (Kyoto, Japan) coupled to a Thermo Fisher Scientific high-resolution Orbitrap Fusion™ Tribrid™ mass spectrometer (MS). Operational control of the LC-MS/MS system was performed with the following software packages from Thermo Fisher Scientific: Xcalibur for data acquisition; FreeStyle for chromatographic peak and MS/MS spectral analysis; and, TraceFinder for peak integration. LC separations were performed using mobile phase (MP) solutions consisting of 0.1% FA in water (MPA) and 0.1% FA in ACN (MPB), and a needlewash solution consisting of ACN:water (1:1, v: v). The chromatographic method included ambient column and autosampler tray temperatures, a mobile phase flowrate of 0.200 mL/min, and a gradient elution program specified as follows: 0-0.5 min, 30% MPB; 0.5-5.5 min, 30-60% MPB; 5.5-6.5 min, 60-100% MPB; 6.5-8.0 min, 100% MPB; 8.0-8.5 min, 100-30% MPB; 8.5-12.5 min, 30% MPB. The overall cycle-time for a single injection was approximately 13.0 min.

[0108] NMR analysis was performed as described previously [43]. Approximately 1.5 mg of combined HPLC fractions of SrnA1 (phe-variant) and SrnA2 (tyr-variant) were dissolved in 600 μl of deuterated dimethyl sulfoxide (DMSO-d6) and the NMR data were collected on a Bruker Advance III-HD spectrometer operating at a proton frequency of 850 MHz. The 1H resonances were assigned according to standard methods [44] using correlation spectroscopy (COSY), TOCSY [45], NOESY experiments. NMR experiments were collected at 25° C. The TOCSY experiment was acquired with a 60-ms mixing time using the Bruker DIPSI-2 spinlock sequence. The NOESY experiment was acquired with 400- and 500-ms mixing times. Phase-sensitive indirect detection for NOESY, TOCSY, and COSY experiments was achieved using the standard Bruker pulse sequences. Peaks were assigned using NMRView software [47].

### 6. Colony Mass Spectrometry for Salivaricin 10 Distribution.

[0109] Four to five colonies, grown on TSYECa agar plates, of each S. salivarius isolate, were collected using a sterile inoculation loop and resuspended in 250 μL of 70% isopropanol supplemented with 0.1% TFA. The cell suspensions were vortexed vigorously for 15 minutes then incubated on ice for 2 hours. The cell suspensions were then centrifuged at 18,000×g for 30 minutes, and the supernatant was collected and subjected to LC-MS analysis. The Salivaricin 10 three peaks were detected in strain SALI-10 and identified as mentioned above with the exact molecular weights. Salivaricin 10-negative variants were identified with the same peptide spectrum with strain SALI-10 but lacked the three peptide peaks corresponding to Salivaricin 10.

### 7. Minimum Inhibitory Concentration (MIC).

[0110] The purified fraction containing the three peptides composing salivaricin 10 was dried, weighed on an analytical balance and suspended in PBS. MIC was performed as mentioned previously [48]. The MIC is the lowest concentration of compound that inhibits the visible growth of the bacteria after 24 h of incubation at 37° C. TSA media was used to propagate the indicator strains. 5% Sheep blood was added to some bacterial cultures, e.g., S. pneumoniae, to promote growth.

### 8. Time Killing Assay of Salivaricin 10.

[0111] Tryptic soy broth was inoculated 1:100 with overnight cultures of either S. pyogenes W51503011 or E. faecalis ATCC29212 and was incubated at 37° C. without shaking until cells were grown to 1×10⁶ c.f.u. per ml. Then, 10×MIC salivaricin 10 was added. At the time points of 0 h, 2 h, 4 h, 6 h and 24 h, samples were taken and serially diluted in PBS. Twenty microliters of each dilution were spotted on tryptic soy agar plates and allowed to dry, and colony counts were determined after overnight incubation at 37° C. using the following equation c.f.u. per ml=the Average number of colonies for a dilution×50× dilution factor.

### 9. Kinetics Pore Formation Assay.

[0112] Membrane permeability assay was carried out using the DNA dye Sytox Green (Invitrogen). Cultures of M. luteus s ATCC10240 were grown overnight at 37° C. in TSB medium on an orbital shaker and then diluted with fresh TSB to 1×10⁶ c.f.u. per ml. Cells were combined with Sytox Green (final concentration 5 μM), HEPES (1 mM) and glucose (1 mM) and incubated in the dark for 10 minutes at room temperature. Labelled cells were analyzed using Cytation 5 plate reader (BIOTEK) for 10 min to establish a stable baseline of the fluorescent intensity (FI). Nisin A (10×MIC), salivaricin 10 (5 and 10×MIC) or PBS were added to the cells and the FI was monitored for 30 min with time interval of 1 min for fluorescence measurement at 488/523 nm excitation/emission. A rapid increase in FI upon antibiotic addition is a strong indication of membrane permeabilization as Sytox Green is impermeable to intact membranes.

### 10. Membrane Potential Dissipation

[0113] Membrane potential dissipation assay was carried out using the BacLight™ Bacterial Membrane Potential Kit (Invitrogen). Cultures of M. luteus s ATCC10240 were grown overnight at 37° C. in TSB medium on an orbital shaker and then diluted with fresh TSB to 1×10⁶ c.f.u. per ml. Cells were combined with DiOC2 (3) according to the manufacturer instructions. Labelled cells were analyzed using Cytation 5 plate reader (BIOTEK) for 2 min to establish a stable baseline of the fluorescent intensity (FI). Nisin A (10×MIC), salivaricin 10 (5 and 10×MIC) or PBS were added to the cells and the FI was monitored for 30 min with time interval of 1 min for fluorescence measurement at 482/497 nm excitation/emission. A rapid increase in FI upon antibiotic addition is a strong indication of the membrane depolarization due to pore formation.

### 11. Intracellular Accumulation of the Peptidoglycan Cell Wall Precursor (UDP-MurNAc-Pentapeptide)

[0114] Accumulation of the UDP-MurNAC-pentapeptide inside targeted bacterial cells was analyzed as described previously with some modifications. M. luteus ATCC10240 cells were grown in BHI on an orbital shaker at 150 rpm, 37° C. for overnight. The culture was diluted 1/20 (v/v) using a fresh medium and further incubated under the same conditions mentioned above until OD₆₀₀ reached 0.5. Chloramphenicol was added at a final concentration of 130 μg/mL and further incubated for 15 minutes. Then the culture was divided into four equal samples (5 mL each) into four 15 mL sterile tubes. Vancomycin was added to the first tube at 10×MIC. The second tube was supplemented with salivaricin 10 (5×MIC), and the third tube was supplemented with salivaricin 10 (10×MIC). The fourth sample was left untreated and served as a control. The four samples were incubated for 40 minutes before centrifugation at 3,000 rpm for 30 minutes. The supernatant was discarded, and the cell pellets were extracted with boiling water for 20 minutes. Cell debris was removed by centrifugation at 13,000 rpm for 15 minutes, and SpeedVacuum concentrated the supernatant to 0.5 mL. Intracellular accumulation of UDP-MurNAc-pentapeptide was analyzed by UPLC-MS using acetonitrile gradient in water on the C18 column at a flow rate of 1 ml·min⁻¹. Diode chromatograms and Tof-MS profiles were compared between the samples to analyze the accumulation of the cell wall precursor.

### 12. Antimicrobial Activity Against Preformed Biofilms (Saliva-Derived De Novo Model)

[0115] Saliva-derived biofilms were established in 24 well glass bottom sensoplates (Greiner Bio-One, Monroe, NC, USA) as mentioned previously [27]. The formed biofilms were then challenged with either salivaricin 10 or nisin A for 30 min, and PBS was used as a negative control. The peptides were removed by pipette, and the biofilms were washed twice with PBS. The biofilm cells were then labelled with Filmtracer LIVE/DEAD Biofilm Viability Kit (Invitrogen, USA), following the manufacturer's instructions. The stains were removed, and the biofilms were washed twice with PBS before fixation using 1.6% paraformaldehyde (PFA). The PFA was removed then Fluoromount-G Mounting Medium (Invitrogen, USA) was added to thin coverslips before flipping over each biofilm sample. The samples were left to mount overnight in the dark at room temperature. Microscopy and imaging were carried out as follows: all biofilms were acquired by a Zeiss LSM 800 with the Plan Apochromat objectives featuring Zeiss 20× (Plan Apochromat; 20×/0.8). 3D biofilm images were constructed by ZEN software (Zeiss). The mean Intensity of pixels for viable signals (Syto-9; live) and (PI; dead) were measured within biofilm areas of each image with the slices containing the highest respective signal intensity using custom Fiji (ImageJ). The thickness of biofilms was defined using a green channel (the distance between the lowest signal intensity from the bottom of biofilms to the highest signal intensity from the top of biofilms). Roughness calculation plugin from custom Fiji (ImageJ) was used to measure the heterogeneity of bacterial distribution based on green channel (Syto-9; live). The inputs were z-stacks in which the pixel values represent the distance to the surface, and the average of roughness was reported as arithmetical mean deviation (RA). All quantifications and statistical calculations are based on 10-15 images and 5-10 stacks for each repeat (three repeats). Image analyses were performed on a laptop computer equipped with an Intel Core i7 CPU, 64-bit operating system.

[0116] A duplicate of the above biofilms was processed differently. After peptide treatment and PBS washing as mentioned above, biofilms were suspended in 100 μL of PBS and biofilm suspension of each well was then used to inoculate 10 ml of BHI broth before incubation at 37° C. for overnight anaerobically. The grown cultures were then centrifuged at 4000×g for 15 min and the supernatant was discarded. DNA extraction was performed on the cell pellets using DNeasy PowerSoil Pro Kit (Qiagen) according to the manufacturer's instruction. The DNA was subjected to 16S rRNA gene sequencing.

13. 16S rRNA Gene Sequencing

[0117] To elucidate the antimicrobial action of salivaricin 10 on preformed salivary biofilms, we extracted the DNA of treated biofilms and subjected it to PCR amplification by targeting the V4 hypervariable region of the 16S rRNA gene, which was amplified using 515F and 806R primers to allow for multiplexing [49]. Amplification reactions were performed using 12.5 μL of KAPA2G Robust HotStart ReadyMix (KAPA Biosystems), 1.5 μl of 10 μM forward and reverse primers, 7.5 μL of sterile water and 2 μl of DNA. PCR conditions were 95° C. for 3 min, 22× cycles of 95° C. for 15 seconds, 50° C. for 15 seconds and 72° C. for 15 seconds, followed by a 5 min 72° C. extension. All amplification reactions were done in triplicate to reduce amplification bias, pooled, and checked on a 1% agarose TBE gel. Pooled triplicates were quantified using PicoGreen and combined by even concentrations. The library was then purified using Ampure XP beads and loaded onto the Illumina MiSeq for sequencing, according to manufacturer instructions (Illumina, San Diego, CA). Sequencing was performed using the V2 (150 bp×2) chemistry. A single-species (Pseudomonas aeruginosa DNA), a mock community (Zymo Microbial Community DNA Standard: https://www.zymoresearch.de/zymobiomics-community-standard) and a template-free negative control were included in the sequencing run.

### 14. Analysis of the Bacterial Composition of the Biofilm Samples.

[0118] The UNOISE pipeline, available through USEARCH v11.0.667 and vsearch v2.10.4, was used for sequence analysis. The last base was removed from all sequences using cutadapt v.1.18. Sequences were assembled and quality trimmed using -fastq_mergepairs with a -fastq_trunctail set at 2, a -fastq_minqual set at 3, a -fastq_maxdiffs set at 5, a -fastq_pctid set at 90, and minimum and maximum assemble lengths set at 243 and 263 (+/−10 from the mean) base pairs. Assembled sequences were quality filtered using -fastq_filter with a -fastq_maxee set at 1.0. The trimmed data was then processed following the UNOISE pipeline. Sequences were first de-replicated and sorted to remove singletons, then denoised and chimeras were removed using the unoise3 command. Assembled sequences were mapped back to the chimera-free denoised sequences at 99% identity OTUs. Taxonomy assignment was executed using SINTAX, available through USEARCH, and the UNOISE compatible Ribosomal Database Project (RDP) database version 16, with a minimum confidence cutoff of 0.8 [50]. OTU sequences were aligned using align_seqs.py v.1.9.1 through QIIME1 [51]. Sequences that did not align were removed from the dataset and a phylogenetic tree of the filtered aligned sequence data was made using FastTree [52]. The 16S copy number and V4 primer differences were estimated with the SINAPS algorithm and the UNBIAS reference databases, accessed through USEARCH.

### 15. Flow Cytometry Analysis of Peptide-Stimulated Neutrophils

[0119] To detect the changes in neutrophil and monocyte CD marker expression and phagocytosis an in vitro assay was performed using either whole human blood or murine bone marrow. For the human blood assay, 100 μl of blood samples were treated with Salivaricin 10 and incubated at 37° C. for 30 minutes, untreated samples served as control. Samples were then infected with 25 μl of pHrodo (Green Escherichia coli BioParticles conjucate, Invitrogen) followed by incubation for another 30 min at 37° C. Samples were fixed with 1.6% paraformaldehyde (PFA) for 15 min at 4° C. Cells were lysed by 1×BD Pharm Lysed solution and resuspended in fluorescent-activated cell sorting buffer (Hanks' balanced salt solution, 1% bovine serum albumin, 2 mM EDTA). Rat serum (60 to 80 μg; Sigma) and mouse IgG (2 μg; Sigma) were added to the samples for 20 minutes on ice to block non-specific binding of immunoglobulins/antibodies to the Fc receptors. Cells labeling was carried out with the following antibodies: CD16-Alexa Fluor 700 (BioLegend), CD63-peridinin chlorophyll protein (PerCP)-Cy5.5 (BioLegend), CD66-allophycocyanin (APC) (eBioscience), CD14 PE-Cy7 (BioLegend), CD18-brilliant violet 421 (BV421) (BD), CD11b-APC-Cy7 (BioLegend) and CD64-phycoerythrin (PE) (BD). The same procedure was used for mouse bone marrow assay and the samples were labeled with the following antibodies, F4/80-brilliant violet 421 (BV421) (BioLegend), Ly-6G-peridinin chlorophyll protein (PerCP)-Cy5.5 (BD), CD62L-APC-Cy7 (BioLegend), CD66a-allophycocyanin (APC) (eBioscience), CD55-PE (BioLegend), CD11b-Alexa Fluor 700 (BioLegend). Samples were then run on a flow cytometer [53].

### 16. Multicolor Flow Cytometry.

[0120] SONY SA3800 flow cytometer was used to acquire the data. To validate the performance of the machine, Align check beads were used. An unstained sample was used to detect the autofluorescence signal and as a reference for the negative spectrum. For a reference for colors, single-color controls were used. To validate the gating strategy and antibody labeling FMO (fluorescence minus one) controls were used. At least 20,000 events were acquired per sample.

[0121] For human blood assay, Gating was performed by use of SSC-Area (SSC-A) by FSC-Area (FSC-A) gate for granulocytes followed by an SSC width (SSC-W) by SSC height (SSC-H) gate to remove doublets. To gate on Neutrophils three steps were followed: SSC-Area (SSC-A) by CD16hi, SSC-Area (SSC-A) by CD 18hi, and SSC-Area (SSC-A) by CD66hi. To gate on monocyte after removing the doublets, cells were gated using CD14hi by CD64hi.

[0122] For the bone marrow assay, SSC-Area (SSC-A) by FSC-Area (FSC-A) gate were used to gate on granulocytes followed by an SSC width (SSC-W) by SSC height (SSC-H) as well as FSC width (FSC-W) by FSC height (FSC-H) gate to remove doublets. Neutrophils were gated using SSC-Area (SSC-A) by F4/80 low followed by an SSC-Area (SSC-A) by Ly6G hi gate.

[0123] To gate on granulocyte in the Thp1 assay, SSC-Area (SSC-A) by FSC-Area (FSC-A) gate was used followed by an FSC width (FSC-W) by FSC height (FSC-H) gate for doublet removal. Live macrophages were then gated using SSC-Area (SSC-A) by eFlour 506low gate.

[0124] Data were analyzed by FlowJo software (v10.8; Tree Star). The mean fluorescence intensities (MFIs) for each CD marker were measured. Significant differences (P<0.05) were determined using GraphPad Prism 9 (GraphPad Software, Inc.). for the in-vitro human blood and mouse bone marrow assay paired Student's t-test (n=3) was used for the statistical analysis. For the Thp1 assay (n=3) one-way analysis of Variance (ANOVA) followed by a post hoc Tukey test was performed.

### 17. Cell Culture and Macrophages Work.

[0125] THP-1 cells; Acute Monocytic Leukemia; (Homo sapiens, ATCC TIB-202) were grown and subcultured in T-75 flasks using RPMI-1640 media supplemented with fetal bovine serum (final concentration 10%), 2-mercaptoethanol (final concentration 0.05 mM) and penicillin/streptomycin (final concentration 100 I.U./mL and 100 μg·ml⁻¹, respectively). Cells were kept at 37° C. with 5% CO₂ and maintained by replacing the media every 2 days. For the experiment, 8×10⁵ THP1 monocyte were seeded in a 6 well plate and differentiated into resting macrophages (M0) using 100 nM phorbol 12-myristate 13-acetate (PMA) (Sigma) for 24 hours at 37° C. with 5% CO₂. Macrophages were then polarized to M1 phenotype by adding 10 μg/ml of lipopolysaccharides (LPS) (Sigma) and 20 ng/ml of Interferon-gamma (IFN-γ) (PeproTech). Cells were then challenged with Salivaricin 10 (15 μg·ml⁻¹) for 24 hours at 37° C. with 5% CO₂, UltraPure Water (Invitrogen) was used as control. Cells were then rinsed with warm PBS and treated with 5 mM EDTA for 5 min at 37° C. with 5% CO₂. Cells were then collected and resuspended in 1 ml PBS, supplemented with 1 μl eFluor506, and incubated at 4° C. for 30 min. Cells were washed using fluorescent-activated cell sorting (FACS) buffer (Hanks' balanced salt solution, 1% bovine serum albumin, 2 mM EDTA) and labeled with the following antibodies: CD40 (AF647) BioLegend, CD163 (BV421) BioLegend, CD206 (PE) BioLegend. After 30 min of incubation on ice, cells were then washed with FACS buffer and fixed with 1.6% PFA for 15 minutes on ice. Cells were then resuspended in FACS buffer for flow cytometry analysis as mentioned above.

### 18. Blood Neutrophils Isolation

[0126] Five milliliter citrate sodium buffered human peripheral blood was layered on the top of 5 ml One step polymorphs in 15 ml centrifuge tube, spun 35 minutes with 500 RCF at room temperature. Neutrophils were recovered from the bottle layer. Mixed RBC was lysed with 1×BD pharm lyse. The total number of neutrophils are diluted with 1×PBS and counted with Beckman Coulter Z2 coulter.

### 19. Murine Neutrophil Preparations

[0127] Mice (8 to 16 week-old C57BL/6) were euthanized by CO₂ inhalation. Femurs and tibias were removed, and bone marrow was isolated. Bone marrow cells were layered onto discontinuous Percoll (Sigma, Oakville, ON, Canada) with gradients of 82, 65 and 55%. Mature neutrophils were recovered at the 82-65% interface.

### 20. Chemotaxis Assays

[0128] A suspension of 1×10⁶ human PMNs in 100 μL HBSS containing 1% gelatin (Sigma-Aldrich) was placed on a 5% bovine serum albumin-coated 22×40 mm glass coverslip and incubated for 10 minutes at 37° C. Coverslips were then inverted onto a Zigmond chamber. Hundred microliters of HBSS and 100 μL HBSS containing N-formyl-methionyl-leucyl-phenylalanine (fMLP) 10-6M or different concentrations of salivaricin 10 were added to the left and right chambers, respectively. PMN migration across the chamber was recorded with time-lapse of video microscopy at 20 second intervals for a period of 10 minutes using a Zeiss Motorized AxioVert (ZEISS). Captured images were analyzed using cell-tracking software (Retrac, v2.1.0.).

### 21. PMN Superoxide Production

[0129] A suspension of 2×10⁵ human blood neutrophil or murine bone marrow neutrophil in 20 μL of PBS was prepared in 96 well plate. A 176 μL final volume of PiCM-G buffer with 2 μL of equine ferricytochrome C was added to the suspension. The plate was incubated at for 10 minutes at 37° C. PMN stimulation was achieved through the addition of either 1 μM 2 μL of phorbol myristate acetate (PMA) or increasing concentration of salivaricin 10 peptide for 15 to 30 minutes at 37° C. The absorbance of reduced cytochrome c was monitored with a spectrophotometer at 550 nm.

### 22. Animal Trial

[0130] Mouse studies were performed in accordance with all relevant ethical regulations and were approved by the University of Toronto Animal Care Committee and the Research Ethics Board (Protocol #20010664). Peritonitis was induced by intraperitoneal injection of pHrodo-Red Escherichia coli BioParticles

[0131] (Molecular Probes) as described previously [54] followed by 100 μL injection of salivaricin 10 (50 μg) in PBS using the same method. All mice were 8 to 16 week-old C57BL/6 and were euthanized by CO₂ inhalation before injections and cell collection. After 3 hours, cells were retrieved from the peritoneal cavity by lavage with 3 mL cold PBS. Cell counts were obtained on a Coulter counter, and the counts were normalized to the volume recovered. Sample preparation for flow cytometry analysis was carried out as described above for in vitro experiments.

[0132] The purpose of the above description is to illustrate some configurations and uses of the present invention, without implying any limitation. It will be apparent to those skilled in the art that various modifications and variations may be made in the process and product of the invention without departing from the spirit or scope of the invention.

### References (all of which are Incorporated Herein by Reference Thereto)

[0133] 1. Proctor, L., et al., A review of 10 years of human microbiome research activities at the US National Institutes of Health, Fiscal Years 2007-2016. Microbiome, 2019. 7(1): p. 31.
[0134] 2. Bitschar, K., et al., Lugdunin amplifies innate immune responses in the skin in synergy with host-and microbiota-derived factors. Nature Communications, 2019. 10(1): p. 2730.
[0135] 3. Caselli, E., et al., Defining the oral microbiome by whole-genome sequencing and resistome analysis: the complexity of the healthy picture. BMC Microbiology, 2020. 20(1): p. 120.
[0136] 4. Barbour, A., et al., Metabolites of the oral microbiome: important mediators of multikingdom interactions. FEMS Microbiology Reviews, 2021.
[0137] 5. Lamont, R. J. and G. Hajishengallis, Polymicrobial synergy and dysbiosis in inflammatory disease. Trends in Molecular Medicine, 2015. 21(3): p. 172-183.
[0138] 6. Baker, J. L., et al., Ecology of the Oral Microbiome: Beyond Bacteria. Trends in Microbiology, 2017. 25(5): p. 362-374.
[0139] 7. Radaic, A. and Y. L. Kapila, The oralome and its dysbiosis: New insights into oral microbiome-host interactions. Computational and Structural Biotechnology Journal, 2021. 19: p. 1335-1360.
[0140] 8. Sulyanto, R. M., et al., The Predominant Oral Microbiota Is Acquired Early in an Organized Pattern. Scientific Reports, 2019. 9(1): p. 10550.
[0141] 9. Kaci, G., et al., Anti-inflammatory properties of Streptococcus salivarius, a commensal bacterium of the oral cavity and digestive tract. Applied and environmental microbiology, 2014. 80(3): p. 928-934.
[0142] 10. Barbour, A., P. Wescombe, and L. Smith, Evolution of Lantibiotic Salivaricins: New Weapons to Fight Infectious Diseases. Trends in Microbiology, 2020. 28(7): p. 578-593.
[0143] 11. Arnison, P. G., et al., Ribosomally synthesized and post-translationally modified peptide natural products: overview and recommendations for a universal nomenclature. Natural Product Reports, 2013. 30(1): p. 108-160.
[0144] 12. Mohr, K. I., et al., Pinensins: The First Antifungal Lantibiotics. 2015. 54(38): p. 11254-11258.
[0145] 13. Fu, Y., A. H. Jaarsma, and O. P. Kuipers, Antiviral activities and applications of ribosomally synthesized and post-translationally modified peptides (RiPPs). Cellular and Molecular Life Sciences, 2021. 78(8): p. 3921-3940.
[0146] 14. Prochnow, H., et al., Labyrinthopeptins Exert Broad-Spectrum Antiviral Activity through Lipid-Binding-Mediated Virolysis. 2020. 94(2): p. e01471-19.
[0147] 15. Iorio, M., et al., A Glycosylated, Labionin-Containing Lanthipeptide with Marked Antinociceptive Activity. ACS Chemical Biology, 2014. 9(2): p. 398-404.
[0148] 16. Meindl, K., et al., Labyrinthopeptins: A New Class of Carbacyclic Lantibiotics. 2010. 49(6): p. 1151-1154.
[0149] 17. Staden, A. D. P. v., et al., Therapeutic Application of Lantibiotics and Other Lanthipeptides: Old and New Findings. 2021. 87(14): p. e00186-21.
[0150] 18. Kindrachuk, J., et al., Manipulation of innate immunity by a bacterial secreted peptide: Lantibiotic nisin Z is selectively immunomodulatory. 2013. 19(3): p. 315-327.
[0151] 19. Chatterjee, C., et al., Biosynthesis and Mode of Action of Lantibiotics. Chemical Reviews, 2005. 105(2): p. 633-684.
[0152] 20. Repka, L. M., et al., Mechanistic Understanding of Lanthipeptide Biosynthetic Enzymes. Chemical Reviews, 2017. 117(8): p. 5457-5520.
[0153] 21. Gerlt, J. A., et al., Enzyme Function Initiative-Enzyme Similarity Tool (EFI-EST): A web tool for generating protein sequence similarity networks. Biochimica et Biophysica Acta (BBA)-Proteins and Proteomics, 2015. 1854(8): p. 1019-1037.
[0154] 22. Shannon, P., et al., Cytoscape: a software environment for integrated models of biomolecular interaction networks. Genome Res, 2003. 13(11): p. 2498-504.
[0155] 23. Afonina, I., et al., The composition and function of Enterococcus faecalis membrane vesicles. microLife, 2021. 2.
[0156] 24. Abranches, J., et al., Biology of Oral Streptococci. 2018. 6(5): p. 6.5.11.
[0157] 25 Stingu, C.-S., et al., Periodontitis is associated with a loss of colonization by Streptococcus sanguinis. 2008. 57(4): p. 495-499.
[0158] 26. Huffines, J. T. and J. A. Scoffield, Disruption of Streptococcus mutans and Candida albicans synergy by a commensal streptococcus. Scientific Reports, 2020. 10(1): p. 19661.
[0159] 27. Shin, J. M., et al., Antimicrobial nisin acts against saliva derived multi-species biofilms without cytotoxicity to human oral cells. 2015. 6(617).
[0160] 28. Fine, N., et al., Periodontal Inflammation Primes the Systemic Innate Immune Response. 2021. 100(3): p. 318-325.
[0161] 29. Fine, N., et al., Distinct Oral Neutrophil Subsets Define Health and Periodontal Disease States. 2016. 95(8): p. 931-938.
[0162] 30. Nguyen, G. T., E. R. Green, and J. Mecsas, Neutrophils to the ROScue: Mechanisms of NADPH Oxidase Activation and Bacterial Resistance. 2017. 7(373).
[0163] 31. Dharmaprakash, A., et al., Development of broad-spectrum antibiofilm drugs: strategies and challenges. 2015. 10(6): p. 1035-1048.
[0164] 32. Wang, M., et al., Microbial Hijacking of Complement-Toll-Like Receptor Crosstalk. 2010. 3(109): p. ra11-ra11.
[0165] 33. Medina, E., et al., Survival of Streptococcus pyogenes within Host Phagocytic Cells: A Pathogenic Mechanism for Persistence and Systemic Invasion. The Journal of Infectious Diseases, 2003. 187(4): p. 597-603.
[0166] 34. Buchanan, J. T., et al., DNase Expression Allows the Pathogen Group A Streptococcus to Escape Killing in Neutrophil Extracellular Traps. Current Biology, 2006. 16(4): p. 396-400.
[0167] 35. Yamaguchi, M., et al., Streptococcus pneumoniae Evades Host Cell Phagocytosis and Limits Host Mortality Through Its Cell Wall Anchoring Protein PfbA. 2019. 9(301).
[0168] 36. Barbour, A. and K. Philip, Variable Characteristics of Bacteriocin-Producing Streptococcus salivarius Strains Isolated from Malaysian Subjects. PLOS ONE, 2014. 9(6): p. e100541.
[0169] 37. Hoshino, T., et al., PCR detection and identification of oral streptococci in saliva samples using GTF genes. Diagnostic Microbiology and Infectious Disease, 2004. 48(3): p. 195-199.
[0170] 38. Wescombe, P. A., et al., Salivaricin G32, a Homolog of the Prototype Streptococcus pyogenes Nisin-Like Lantibiotic SA-FF22, Produced by the Commensal Species Streptococcus salivarius. International Journal of Microbiology, 2012. 2012: p. 738503.
[0171] 39. Chin, C.-S., et al., Nonhybrid, finished microbial genome assemblies from long-read SMRT sequencing data. Nature Methods, 2013. 10(6): p. 563-569.
[0172] 40. Overbeek, R., et al., The SEED and the Rapid Annotation of microbial genomes using Subsystems Technology (RAST). Nucleic Acids Research, 2013. 42(D1): p. D206-D214.
[0173] 41. Blin, K., et al., antiSMASH 5.0: updates to the secondary metabolite genome mining pipeline. Nucleic Acids Research, 2019. 47(W1): p. W81-W87.
[0174] 42. Geng, M., et al., Covalent Structure and Bioactivity of the Type All Lantibiotic Salivaricin A2. 2018. 84(5): p. e02528-17.
[0175] 43. Ravichandran, A., et al., The Presence of Two Cyclase Thioesterases Expands the Conformational Freedom of the Cyclic Peptide Occidiofungin. Journal of Natural Products, 2013. 76(2): p. 150-156.
[0176] 44. Wüthrich, K. J. E. N., NMR with Proteins and Nucleic Acids. 1986. 17(1): p. 11-13.
[0177] 45. Braunschweiler, L. and R. R. Ernst, Coherence transfer by isotropic mixing: Application to proton correlation spectroscopy. Journal of Magnetic Resonance (1969), 1983. 53(3): p. 521-528.
[0178] 46. Kumar, A., R. R. Ernst, and K. Wüthrich, A two-dimensional nuclear Overhauser enhancement (2D NOE) experiment for the elucidation of complete proton-proton cross-relaxation networks in biological macromolecules. Biochemical and Biophysical Research Communications, 1980. 95(1): p. 1-6.
[0179] 47. Johnson, B. A. and R. A. Blevins, NMR View: A computer program for the visualization and analysis of NMR data. Journal of Biomolecular NMR, 1994. 4(5): p. 603-614.
[0180] 48. Barbour, A., et al., New insights into the mode of action of the lantibiotic salivaricin B. Scientific Reports, 2016. 6(1): p. 31749.
[0181] 49. Caporaso, J. G., et al., Ultra-high-throughput microbial community analysis on the Illumina HiSeq and MiSeq platforms. The ISME Journal, 2012. 6(8): p. 1621-1624.
[0182] 50. Wang, Q., et al., Naive Bayesian Classifier for Rapid Assignment of rRNA Sequences into the New Bacterial Taxonomy. 2007. 73(16): p. 5261-5267.
[0183] 51. Caporaso, J. G., et al., QUIME allows analysis of high-throughput community sequencing data. Nature Methods, 2010. 7(5): p. 335-336.
[0184] 52. Price, M. N., P. S. Dehal, and A. P. Arkin, FastTree: Computing Large Minimum Evolution Trees with Profiles instead of a Distance Matrix. Molecular Biology and Evolution, 2009. 26(7): p. 1641-1650.
[0185] 53. Oveisi, M., et al., Novel Assay To Characterize Neutrophil Responses to Oral Biofilms. 2019. 87(2): p. e00790-18.
[0186] 54. Fine, N., et al., Primed PMNs in healthy mouse and human circulation are first responders during acute inflammation. Blood Advances, 2019. 3(10): p. 1622-1637.

1. A composition comprising a pre-SrnA1 peptide having a sequence of SEQ ID NO.: 1, a SrnA1 peptide having a sequence of SEQ ID NO: 2, a pre-SrnA2 peptide having a sequence of SEQ ID NO.3, a SrnA2 peptide having a sequence of SEQ ID NO: 4, a pre-SrnA4 peptide having a sequence of SEQ ID NO.: 7, a SrnA4 peptide having a sequence of SEQ ID NO: 8, a peptide having the sequence of SEQ ID NO: 16, or post-translationally modified versions thereof.

2-4. (canceled)

5. The composition of claim 1 wherein the post translational modifications comprises a phosphorylation at Thr4 amino acid of each or all of SrnA1, SrnA2 and SrnA4.

6. The composition of claim 4 wherein the post translational modifications comprise a single phosphorylation at Thr4 amino acid of each or all of SrnA1, SrnA2 and SrnA4.

7. (canceled)

8. The composition of claim 1 wherein the post-translational modifications comprise dehydrations at one or more of amino acids 9, 19 and 21 of each or all of SrnA1, SrnA2 and SrnA4.

9. The composition of claim 1 wherein the post-translational modifications comprise a β-methyllanthionine ring between amino acids 9 and 14 (Abu9-S-Ala14), a β-methyllanthionine ring between amino acids 19 and 24 (Abu19-S-Ala24), and a lanthionine ring between amino acids 21 and 31 (Ala21-S-Ala31) of each or all of SrnA1, SrnA2 and SrnA4.

10-11. (canceled)

12. The composition of claim 1 derived from a SALI-10 strain of S. salivarius.

13. The composition of claim 12 wherein the SALI-10 is characterized by comprising a megaplasmid.

14. The composition of claim 13 wherein the megaplasmid has a size of 164 kb.

15. The composition of claim 14 wherein the megaplasmid has a sequence of SEQ ID NO.: 15.

16. The composition of claim 12 wherein the SALI-10 is characterized by comprising a gene sequence of SEQ ID NO.: 14.

17. The composition of claim 11 wherein the SALI-10 comprises an SrnM lanthionine synthetase having a sequence of SEQ ID NO:9.

18. A pharmaceutical composition comprising the composition of claim 1 and a pharmaceutically acceptable excipient or carrier.

19. Method of treating a bacterial infection caused by a pathogen selected from the group consisting of multi-drug resistant (MDR) Streptococcus pneumoniae, Streptococcus pyogenes, Streptococcus dysagalactiae, vancomycin-resistant Enterococcus faecium, Porphyromonas gingivalis, Tannerella forsythia, and MDR Enterococcus faecalis comprising administering a pharmaceutically acceptable amount of the pharmaceutical composition of claim 18 to the patient.

20. (canceled)

21. Method of treating Actinomyces graevenitzii and/or Granulicatella adiacens-associated pulmonary abscess, Bifidobacterium dentium associated caries, or S. pyogenes associated strep throat in a patient in need thereof, or of modulating an anti-inflammatory response or reducing inflammation in a patient in need thereof, comprising administering a pharmaceutically acceptable amount of the pharmaceutical composition of claim 18 to the patient.

22-29. (canceled)

30. Method of modulating an anti-inflammatory response, modulating phagocytic activity of neutrophils, or activating reactive oxygen species of neutrophils in a patient in need thereof, comprising administering a pharmaceutically acceptable amount of salivaricin peptides to the patient.

31-32. (canceled)

33. Method of activating neutrophil chemotaxis, or polarizing macrophages towards M2 anti-inflammatory phenotype in a patient in need thereof, comprising administering a pharmaceutically acceptable amount of the pharmaceutical composition of claim 18 or a salivaricin peptide to the patient.

34-35. (canceled)

36. An isolated S. salivarius strain SALI-10 having: (a) a genome sequence of SEQ ID NO: 14; (b) a megaplasmid sequence of SEQ ID NO: 15; (c) an SrnM having a sequence of SEQ ID NO: 9; and (d) expressing a peptide SrnA1 having a sequence of SEQ ID NO: 2, a peptide SrnA2 having a sequence of SEQ ID NO:4, a peptide SrnA4 having a sequence of SEQ ID NO: 8, or post-translationally modified versions thereof.

37-40. (canceled)

41. The isolated S. salivarius of claim 36 wherein the post translational modifications comprises a phosphorylation at Thr4 of each or all of SrnA1, SrnA2 and SrnA4.

42. The isolated S. salivarius of claim 36 wherein the post translational modifications comprise a single phosphorylation at Thr4 of each or all of SrnA1, SrnA2 and SrnA4.

43. The isolated S. salivarius of claim 36 wherein the post-translational modifications comprise three dehydrations and one phosphorylation.

44. The isolated S. salivarius of claim 43 wherein the post-translational modifications consist of three dehydrations and one phosphorylation.

45-46. (canceled)

The application's sequence listing, which the Patent Office published only in electronic form, follows.

SEQUENCE LISTING (16 sequences)

SEQ ID NO: 1 - protein, 60 aa, Streptococcus salivarius
MAKNTSRPEIDSLSFEVENQELSGKSGSGWFTAVQLTLAGRCGRWFTGSFECTTNNVKCG

SEQ ID NO: 2 - protein, 32 aa, Streptococcus salivarius
GWFTAVQLTLAGRCGRWFTGSFECTTNNVKCG

SEQ ID NO: 3 - protein, 60 aa, Streptococcus salivarius
MRKNNNRKEIDTLDFEVKNQELSGKSGSGWFTAVQLTLAGRCGRWFTGSYECTTNNVKCG

SEQ ID NO: 4 - protein, 32 aa, Streptococcus salivarius
GWFTAVQLTLAGRCGRWFTGSYECTTNNVKCG

SEQ ID NO: 5 - protein, 60 aa, Streptococcus salivarius
MKSKKVNTEIDTLEFEIDNQELNGTSGSGWWYTAFKMTLAGRCGLCFTCSYECTTNNVHC

SEQ ID NO: 6 - protein, 32 aa, Streptococcus salivarius
GWWYTAFKMTLAGRCGLCFTCSYECTTNNVHC

SEQ ID NO: 7 - protein, 58 aa, Streptococcus salivarius
MKQDNFEIDSLDYEINSQELNGKSAAGWSTAVRLTVQGRCGWWFTHSYECTSPNVRCG

SEQ ID NO: 8 - protein, 32 aa, Streptococcus salivarius
GWSTAVRLTVQGRCGWWFTHSYECTSPNVRCG

SEQ ID NO: 9 - protein, 984 aa, Streptococcus salivarius
MSMVSEKWLSLFNNIEDDEQLDEFLKTTSGDSLQDWEEKFLQYEQWGKDYIERELGTILYDEYNPQEKLRVSIHWLDLFKPICFKYLERLTSFLNKAQCITNTNEFILDIESVFFEICMNMSYRTVVLEINDLRRASRLKGEDSKKRYNYFINTLLKDRDYILEFYKKYPVLFELLDKKISNILDYIEQIILNFEENLLDLESYFNYKDLKLSSIDFNAGDTHSNGKSVCILRLNTKKKLVYKPRNMSIDVNLSLFSKEFAHRFGLSESLFVPKTLSKDSYSFVEFIEEKECNSLQEVEAYYTNMGKLLAFLHIFGAKDYHGENILACQEYPYLIDNETILHFSEPVNITSNSQNIYNFVTNSVYSVGILPMSLYSANNDKGMEIGALNSGERRESPYLSHQLANVGTDEIRIEKVFKMVGDFPSTVRYKGNNVSCSNYLNEVQRGFETIYKVVLQNRDIVSRMIVKYFENCETRYIYRNTNVYAQFLETSHHPELLKNKYDFEMYLLRLFEYGDVANFFDNVMMKDEVCQFRKGDIPIFYANTSSNEIRNGLGRYICSLDGHSIVNKVLNRITSLSDDNLLRQKRIINMAFMGSELFPKKSRISEEHTNTETITSNIINRISSAKFEFNTEISWLSMVAMNKNYEIYPMDYSLYSGTSGMILGITSIDDTRLRTLLPGVINYTNNYIKELQGNFPVHQLGAFTGVYGYLYTLCVLREEGTPFVEDIEEIIYETLSSTFRHLRNIDNLDIIGGLAGILGVLIKIQKTMLDSSRVTELTQKLSEGVVQKILEKYKKDGFWIENDPGYAHGNYGIITQLYRYSLSNTCKSDAKTSIISCIKEYLDKERSLLCGKNCFPLRNNVKYYSWCNGIVGIVNAKNYLETNEFPDKFLKTEVQDYSNKILNQDSTLDNSICHGSIGNLVILDSILGYSVDIENRIATESSSYLLDKETYECDDWGILTGEMGILMANDRKSRTRLNDILLLN

SEQ ID NO: 10 - protein, 984 aa, Streptococcus salivarius
MSMVPEKWLSLFNNIEDDEQLDEFLKTTSGDSLQDWEEKFLQYEQWGKDYIERELGTILYDEYNPQEKLRVSIHWLDLFKPICFKYLERLTSFLNKAQCITNTNEFILDIESVFFEICMNMSYRTVVLEINDLRRASRLKGEDSKKRYNYFINTLLKDRDYILEFYKKYPVLFELLDKKISNILDYIEQIILNFEENLLDLESYFNYKDLKLSSIDFNAGDTHSNGKSVCILRLNTKKKLVYKPRNMSIDVNLSLFSKEFAHRFGLSESLFVPKTLSKDSYSFVEFIEEKECNSLQEVEAYYTNMGKLLAFLHIFGAKDYHGENILACQEYPYLIDNETILHFSEPVNITSNSQNIYNFVTNSVYSVGILPMSLYSANNDKGMEIGALNSGERRESPYLSHQLANVGTDEIRIEKVFKMVGDFPSTVRYKGNNVSCSNYLNEVQRGFETIYKVVLQNRDIVSRMIVKYFENCETRYIYRNTNVYAQFLETSHHPELLKNKYDFEMYLLRLFEYGDVANFFDNVMMKDEVCQFRKGDIPIFYANTSSNEIRNGLGRYICSLDGHSIVNKVLNRITSLSDDNLLRQKRIINIAFMGSELFPKKSRISEEHTNTETITSNIINRISSAKFEFNTEISWLSMVAMNKNYEIYPMDYSLYSGTSGMILGITSIDDTRLRTLLPGVINYTNNYIKELQGNFPVHQLGAFTGVYGYLYALCVLREEGTPFVEDIEEIIYETLSSTARHLRNIDNLDIIGGLAGILGVLIKIQKTMLDSSRVTELTQKLSEGVVQKILEKYKKDGFWIENDPGYAHGNYGIITQLYRYSLSNTCKSDAKTSIISCIKEYLDKERSLLCGKNCFPLRNNVKYYSWCNGIVGIVNAKNYLETNEFPDKFLKTEVQDYSNKILNQDSTLDNSICHGSIGNLVILDSILGYSVDIENRIATESSSYLLDKETYECDDWGILTGEMGILMANDRKSRTRLNDILLLN

SEQ ID NO: 11 - protein, 32 aa, Streptococcus salivarius
  MOD_RES 4: note = PHOSPHORYLATION
  CROSSLNK 9..14: note = THIOETH -
  MOD_RES 9: note = Abu
  CROSSLNK 19..24: note = THIOETH -
  MOD_RES 19: note = Abu
  CROSSLNK 21..31: note = THIOETH -
GWFTAVGLXLAGRAGRWFXGAFEATTNNVKAG

SEQ ID NO: 12 - protein, 32 aa, Streptococcus salivarius
  MOD_RES 4: note = PHOSPHORYLATION
  MOD_RES 9: note = Abu
  CROSSLNK 9..14: note = THIOETH -
  MOD_RES 14: note = Abu
  CROSSLNK 19..24: note = THIOETH -
  CROSSLNK 21..31: note = THIOETH -
GWFTAVGLXLAGRAGRWFXGAYEATTNNVKAG

SEQ ID NO: 13 - protein, 32 aa, Streptococcus salivarius
  MOD_RES 4: note = PHOSPHORYLATION
  MOD_RES 9: note = Abu
  CROSSLNK 9..14: note = THIOETH -
  MOD_RES 19: note = Abu
  CROSSLNK 19..24: note = THIOETH -
  CROSSLNK 21..31: note = THIOETH -
GWSTAVRLXVQGRAGWWFXHAYEATSPNVRAG

SEQ ID NO: 14 - DNA, 2096969 bp, Streptococcus salivarius
  source 1..2096969: mol_type = genomic DNA
caaccaaataagttgaaatatgtactgtttagacttaaagtgttaaagctagccttcagtatacaaaacgttttttgatgttattttaggagtctaaattgaaatactctgttattattccagtttataatgttgagaaatacattgatcgttgtttgaaaagtattatttctcaaaattatgatgacttggaaattatagtgatagacaatggatctactgatagtagtggcagtatttgcgatacttatgctagtgaatactcaaatatctcagtctatcatattgaaaaccacggtgttggttcggcacgaaattttggcttgtccaaagccaggggagagtttatctacttcgttgatagtgatgactatcttgttggtaatctctttgctgattttgcagataagctagtctcagatttggatttggctgtttttagttattacaattcttttgaggaagatttaactgagaagcagcgtactgaaaagtcacttccgtttaaagggagttacgacaaggatggttttatcaagatatttattgacttattcttatcggatatgctttacacaatttggaataagatatatcgcagagaatttcttcttgaaaataacctttcttttgagcagtatgagttaggtgaagatgttcgctttaatcttgatgtttatcgtaaagtcaacaagatttatctttctcaagattcctactacgtttatgtcaatggtagaaaaggttccgccatgtcgggctataaccctaaacgtcttcaatatcagcttcaagaattgaagatggttgataatctactttctgactggaatttggatagttcaaacttcgttaatactgtaaaatcaagaatactgatgagtaacatctacaatataacgaaacagaatttatctgtaaatagaaaagttaagcttgttaaagatacatgtgaaagacaagagatagaggattttataaagaatgattcttctgcattgaatccactcataaaactgttgttgaaatgtcgaatgtatgttgttctgatttatcttaaaaaaatacagatggtattacaacatttataagaataattgaaaggtatggaaagtacttgtgaatagcagtcgctttatctcagagaaaatctatttatttacactctttgtttgggtattatttgcatctctggtaactacaacttattttataaggctggatggttttttgtcactctatcgtatcttgctatattttacaataggtatgattacgataaaggaactcattaatcttcctgataccataaattatttcagataccacttgaaggaattaataattttcctattatttaccttgaccatgttaattgtgtcaaaaaatcgagatggtcttcctgatattaatgttttgctgttagttttttcagctagggatatagagttcaagaagttattagggactttctccttcgccacatttttagtgctgtttgtaactattctagctagtaagatgggcattatctcaaatatgttgatgagtgcagatagtggttatcgttatagtttaggcttcaactatgtgtcctttgcctctcaacgtatgttctttgccctatgtagttacttaatgttcagaggaaagaaagtttcttatctagagttgttagctctactgtttgctacattttatatgtaccaacagacttcaacctcaagtccactttatctaagtctcttgattttgacttatgcgttatttagtcttaaggtctttaaatttgattttatagacagtaatgtcataacagcaaatattgctaaatatggttttattattgcattgctcattactctatatttctgtttctattcaactggtgatttattccatctagttgaccaatttacgcataaccgtctaagactaagtgttcaagggttccgaaactttggtgtttccttattaggtcgaccaatttcatttacgaccatggatatttttggtaactattcaagcaattataactttattgatagttcatttgtgcagttactcgtaattgatggattggctgtgagtgcattcatgttatttgctttaacacgtgtcatgaattattttgtaactaatcgaaaagatatcattcttgcctgcctgggggttatgatcattcatggcatgtttgatccccaaatgctcgttcttcgttactcacctcttatcctattgattagtcgactctttgtgatgaagactgataaagattttttgtaattgaagcagaggtatatcatttagaaagtctaaacagagtcatatacttatgaaagttttaaaaaattacgcctacaatctttcctatcaattactggtcattgttttaccaatcattacgacaccatatgttactcggattttcagttccaaggatttaggtacttatggttactttaactctattgtgacctactttattcttttggcgactttgggagttgctaactatggtactaaagagatttcagggcatcggaaggatattcgtaaaaatttctggggtatttataccctccaattgattgcgactattttgtctcttgtcttgtatacatcattatgtttgttctttcctggtatgcaaaatatggtggcttatatcttaggattaagcttgatatcgaaagggatggacatttcttggttattccaaggtttggaggattttcgtcgtattaccgcaaggaatacaacggtgaaggttttaggagttgtttccatcttcctatttgtgaaaacacctggtgatttgtatctctatgttttcctattgaccttttttgaattgcttgggcaattaagtatgtggttaccagcgagaccttacattggagaaccacaatttgatttatcctatgctaagaaacatcttaaacctgttattttgctgtttctccctcaggttgccatttcactatacgtgactttggatcgtaccatgttgggtgccttgtcatcgacaaatgatgtcggtatttatgaccaggccttgaagattatcaatatccttttaacattagtaacgtctttgggaagtgtgatgctcccaagggtatctggtctcttgtctagtggtgaccataaggccgttaacaagatgcatgagttgtctttcttgatttataatctggtgattttcccgattatagcaggtctattgattgtcaataaggactttgtgagtttcttcctaggaaaagatttccaagaggcttatcttgctattgctattatggtctttaggatgttctttattggttggacaaatattatgggaatccagattttgattccacataataaacatcgtgagtttatgctctctacgactattccagccgttgtcagtgtgggacttaatctcttattgattcctccatttggttttgtcggagcctcaattgtatcagttttaacagaggctttggtatggattattcaattgaatttttcaagaagattcatcaaagatgtttcaatccttccagccatgtcaaaaattatcttagcatcagttgtcatgtatcttggactctttgtctttaagatatttgtccaatttaaacctatgcttaatgtagcagtagatggttttgtcggtgctatcatttatatcgtcttgattattgtcttacgtgtcgttgatatgaaagacttgaaacaacagttaatgaaaaactaaggagaaaaatatgtacgattatcttatcgttggtgctggtttgtctggagcaatcttcgcacacgaagcaactaaacgcggtaaaaaagtaaaagtgattgacaagcgtgatcacattggtggtaatatctactgtgaggatgttgaaggtattaacgttcacaagtatggtgcccacattttccatacctcaaacaaaaaagtttgggactatgttaaccagtttgctgaatttaacaactatatcaactcaccaattgctaactacaagggcagtctttacaatcttccattcaacatgaatactttttatgctatgtggggcactaagactcctcaagaagttaaggacaagattgctgagcaaacggctgatatgaaagatgttgagcctaaaaaccttgaagaacaagctatcaagttgattggtccagatatctacgaaaagttgatcaagggatacactgaaaaacaatggggacgttctgccacagaccttcccccatttatcatcaaacgtcttcctgttcgtttgacttttgataacaactactttaatgaccgttaccaaggaattccaatcggtggttacaacgtcatcattgaaaacatgcttggtgatgtagaagtagaacttggtgttgacttctttgccaatcgtgaagagcttgaagcttcagctgataaagttgtctttacagggatgattgaccagtactttgattacaaacacggtgagttggagtatcgcagtcttcgttttgaacacgaagtcttggatgaagaaaaccatcaagggaacgccgtagtcaactacacagagcgtaagattccttatactcgaatcatcgaacataagcacttcgagtatggtacacaacctaagacagttatcacacgtgaatacccagctgactggaaacgtggggatgaaccatactacccaatcaatgatgaaaagaacaacgccatgtttgctaagtaccaagaagaagctgagaaaaatgacaaggttatcttctgtggacgtttggcagactataaatactacgacatgcacgtggtcattgagcgtgctctagaagtcgttgagaaagaatttactaaatgacacaagaaaaaattgatatcgttgttctctgggtagatggaagtgacccagagtttatccgtgagaaacaggctgtgactggtaaagttgcagatttggaccaagaaattgatggtgagcaacgttatcgtgattatggtatctttaattactggttccgaatgattgaaaagcatgctccttgggtaaataatgtttatttgattaccaatgggcaaaagccagactggttgaatttggatcatccaaaactcaaattggtcactcataaggaatttatgcctaatgaatacctacctacctataattcagcagctattgagcttaatcttcatcgtattgaaggattgtcggagaactatttgtatttcaatgatgatatgtacttgattagagatagtcacccttcagatttttataaaaatggtcaacccaagcttttagcagtatacgatgctttagttccttggtcaccgtttactaatacttatcacaataatgttgaattaatctatcgtcattttcctaataagaaggctttgaaatcctcgccttggaaattctttaatttccgttatggttccctagttttgaaaaacttgttactcttgccttggggtccgacgggatacgtgaatcaacatttacctgttccaatgaagaaaagcactttggcacatttatgggaaattgaaggggaaactttagataaaacatcacgtaatcaaattagagattatggagtagatgttaatcaatatatctgtcaacattggcaaattgaaagtaatcagttttaccctatgtcaaagaattttggagagtcgatagatctaaatcaagttgataggttagtgagtatctttaaagataaacgtaaaaaattgctttgtgtcaatgatgacattgactttaaagaagagtatatcattcgttttaaggaaatcttgaaagaacgctatcctgaaaaatcagcttttgaaaaatgagaaataagagatgaaatactatttaaaagaagaatttttacacgataacaatgttaaaaatgcaggaaataaggctcgtaatgacgttgaagaaattgtaaagagagagggctatcaagccctggttctttcagttgacaattggtacgagatgagcactgttaaagcacagcttcataaatcaaaggcttttggtcaggctttggatcaattgcaacaaggagatgaattgcttattcaattcccgatgcttcaccatagcttttttacaacacatcatgtcaagaaagcgcagaaaaaaggggtaaaagttaattttattatccacgatttagaagctcttcgttatgtcaatgttgaaaatttccctttaaagcataagattcgtattcagattcaagaatcaggtcttcttggtgcagctgatggcatcatcgcccacaatccaattatgaaatctgttttggtggataaagggattgcggaagataagattgttagccttggcattttcgactatttgattccaaatttccaagagaagacaggtctaagtaagaatcagccaattattgtggctggtaatctggcacaagaaaaagctggttatctttactcacttcctgcgaaacctgcttataacctttatggtgttggcttcgacgagagcagagctcttgagaatgaggcttactttggctcattcctacctgatgaccttcctgcagcccttgagggtggttttggacttgtctgggatggtgatagtgctgaaacatgtagtggtgtttttggtgagtatcttcgctataacaactctcataaggcgtcactttacttggcatcaggattcccgcttgtcgtttggaaacagtcagccttgtctcactttgtgcttgagaatggctgtgggattgcagtagagtcgcttcatgatttgaaggttaccattgacaatctttcagatactgattaccaagatttgcttgaaaatactaagcgtgtcggtaaaggtattcgtgatggtcactacctacttaccgcattgaacaatttgaaataagataaaaaatcctcattttagtgaggatttttgcattatttggagatttcaaactggtattgggttcctgcaacttttccgtttgaatagattgctttaatatagtcgtcataagtgattgacttggacttacctgcttttacgagctcaggatctcgccatacatttggatcagtagcattgctatctcgcttggtgagatagaggtactcaatgtaggttctattgtcgacaaaagccccagcaaccttttccgtaccattatcagatcgcgtatacatacgagtcgttccaccaccatctagcaggaaggcaaggcgaatatttgagtatcctaaattttttaaaaggttgtatacgtcttggtgattcaagcccttattgagggagttgtggccataggtttggataatacggataataccgtcataggtttctacataaatggaacgggcatttggttggtcaggatcacctttctcccaggttttatctaccttcttatccttaatgagaataccaaaggcacctgtatcccaaccattgcttcccatgtgggtaaacattttagctgtgtctatatttgggtaggtaccggcagtgatattattttgatcatctccatatagaaggcctgttttgcccaattcgatttccttttgagcgaagggacgatctagtccttcgtaagaccaaaaacctgcgttaatgagagcaagagcatctcgtcgcttagcttcgtacttaatactttgctctgtgagttcaggattatcatcttcggttcttcctttttgtaggatgtattttccatccttcttgaaggatagaatctgcatgtctacatttttaatagtgcctttttcaagtaggacagactgatctaagagctctttattttttatggtaaagttcaatccgcccttatttgatggcatagaaagcttcttaatatctcggttgttgaagtagatggtgaggtagagcagtcccccaacgatggcaccaatcattagaagagaaaatagtattcttaaaatattcttcaatttcatactatcattataaacaatctaggcttacaaaacaatcctaagaccattaaatatccaagaatagtatcagtttttcttagtatggtactggtaagcgttttctaaaagggttataataagagtgagttagtcaaggaggtgctttatgaccattaaggtgattgcaacagatatggatggaacatttttagacgataaagggagctatgacaaggagcgttttagtcagattttagatgctatggctgcgcgtgatatgcattttgtcgttgcatcaggtaatagtatgagccgccttaaacccatgtttgcggagacttttgaccgcctgcattttgtagctgaaaatggtggtcaggtggttagctatggcaagcttctatgtcaggagtttatggcatcaaatgatgttgaaaacctgctaagctattttaattatgatttgttggataggccaactatatttaatggtgctcaaggctcctatatgttaaaagggtctagggtcaattttgctgagatgataacagaagaagagcaagccgccatggaagcatccattcaacgtttgaatgggctggaggatttagatgatgatttcatcaagattaccatgttgctgagtcctgaagaggctgatcgtgtgtcacaggcttttaatcgtgattttgatggcaatctagttgctgttcccagtggttttggtgctattgacttcattcaaaaaggcatgcacaaggcttggggactcaagcagcttcttaaccactgggacttgtctgagtccaatgtcatggccttcggtgatggtgacaatgatcttgagctcctgcaaatggctggccgctcttatgctatggaaaatgccagtccagctattttacaagtggctgatcagattgctccccaccacaaagaccaaggagtattgactgtcttagaagattatttaggattggtttaaagatagggtggtagagtaatgaagttatatttaatgagacatggtgagacactatttaatacacaaaagcgtgttcagggctggtgtgactcgcccttgactgaaaatgggatttggcaggcagaacaagccaagcagtactttgcaaagaaaggtatttcttttgatgctgtctactcctctacgcaagagagagctactgatacggcaaagattgtggcacctgactattcggtaacccagctcaagggaattaaagaaatgaactttgggtcttttgaagctcaaccagagcatctcctacccaaacatcgaccaggttcacgatcctttgaagatctcttggtcccatacggtggtgaagatattcgcgaggttggtcagagggttttaaagactgtgttagagaaagcagaagcacacactaaagatggaactgagaatctcctatttgtcagtcatggagcagctttatggggattaatcattttcatggacttggcctttcctgaaggagtgggctttggaaattgtaatgtttgtgtttatgagtataaccaaggtcaattggagcttcttcaggtgattgatccgatttctggtttagaggtaacattatgaaagaattttatttaatgagacatgggcaaacacggtttaatgttcagcatagacttcagggggtctgcgatgctcctttgacggatgtcggaatcgaacaggctaaaaaggctggtcagtatctagccaagcaggaaccgatttttgatcatgtctttacttcaacctctgagagagctagtgatactctagaaattgtgactggacgaacagactatgaaagacttaaaggtcttaagggacaggattttggagcttttgagggccagccagagtatcttactcctaaaaccttacctgatggacaaggttttggtgattactttgttcaatttggtggtgagagtacgacccaggttcgggatcgtatggagttaactattagggccatcatggagagtgtggccgatggttctaagtctttacttgttagtcatggaccatctattttgcagttctgtagacgtgttttaaatcccgacccagatattcgtggtcttaaaaattgttgtatcttacactttacttatgatcaagggcaatttgaactggtttcagtatataatcctgtagaagaagagtatatctatggaggcgaagaatgacacgactctatttaatgagacatggacagacactttttaacacacttaatcggattcaaggttggtgtgattctcccttgactgagaaaggtcgggaacaagctcgtcaggtccgtgcttattttgaaaaacatgatatgacttttgatcagtattattgtacgacaactgaaagagcttctgataccattgaattggcgacagggcgtactgattatcaacgtgttaagggacttaaagaaatgcattttggtatctttgagggtcagccagagtatcttcatcccaagacatctgttgtggggcattttggtgaccactatgcccagtttggtggggaaagtcaggatcagttcgttgcgcgtgttgttgcgagtgctagggagatagtagatatgcattctgaccaatctattttagctgttagtcacgctggagccttgatgacttttcttcatgccgtggagccagagcgggcctttgagtcgtgtccaggcaattgtgccatcttagtttttgattacgatggatcgagcttccactttgtcaagttgattgatccaatagctgatcaagagttggtggaattttagcggctttctatgatcaaagatagtaagaaacccttttttagtgtataatggaagggtattttaaattttggagttcctatgaaatttacaaaaaatcagttcatttggttggctgtcctctttttcagctgtttcttgatttatacatactgggaaaccgttgtttcaatttgtaacactatttacattgccagtcagcccttcttggttggagcagggattgcctttgtggtcaatatcctgatgtctttttatgagaagctactggtcaagtttattccatttggttttatagctaagatcaagcgtcctatttctttgctctcggcattggcgaccattggtttggtctttacttgggtagtcttcactgttcttcccgatttgattgacagtatcaacacattgattagtcaagaccgttcagctattaataatttgattaattggctgctaaaaaacaagtccttgcaaaaaattattcaagatcttggtggtgtgacacaggttagagagctaatcaatagctacagtgctcagttgcttcaacaaatcatgaatggtttgacaagcttcttgacttcgttaacgagtctaccatcaaccttgattaatctctttattagtatcgtcttttcttgctatgttttggctgggaaagaaaaacttggaaatcaggtcaatcgtttggtagatgtttatttgggacgttatggtaagactttccactatgtagttgctattctcaataatcgcttccgcaatttcttcgtctatcagtcgattgaggcttgtatcttggggaccttgtgctatatcgggatgctcatatttaatttcccttacgctgcgactatttctatcctgattggcttttcagctatgattccagttgtgggggcctatatcggtgtgacgattggtaccatcttgattatgacgcactctgtgaccttggcacttttgtttgttgcctacgtggttattttgcagcagtttgaaggaaatctcatctatccttatgtggttggtggctctaccggacttcctggtatttgggttatctttgctatcaccataggttctgccttgggtggtatcttaggcatgttggtttctgtgccagtagctgcaaccctttatcagattgttaaagacaatgttgttagacgagaagaagtcaaagcagcaaatgctattgaaaataatgattaattaaaacagacttgggtctgtttttttcgtactatagtatcagatgtcaataagatagtataagtgtaatcgttttctaagtgttatactattagtagattaaacaagacgaggagataaaagatgacttacacatttccaaaagaatttctctggggtggtgcaacagctgccaaccagtttgaaggtgcttataacctagatggcaaaggattgtctgtacaagatgtgacgccaaatggcggtgttccttttgaacctggggctttgaatcctttgatcacagatcaaccaacatcagataatctaaagctagaaggtatagatttctatcatcgttataaagaggacatagcactttttgcagagatgggcttcaaggtctttcgtatgtcgattgcttggtctcgtattttcccaaatggtgatgatgctgagccaaatgaagctggcctagccttctatgataaagtctttgatgaattggctaagtatggcatcgaaccacttgtaaccttgtctcactatgaaacacccctcaacttggcgcgtaaatacaatggatggactaatcgtaaattaattggtttttatgaaaactatgtccgtaccgtcttcacacgttataaagataaggtcaaatattggttgacctttaatgaagtgaactctgttctacatgcacctttcatgtcaggtggtattgcgacacctatggaagagctctctaaacaggatctttaccaagcagtccaccatgaattagtcgcatcagcttcagcaaccaagatcggacatgacatcaaccctgattttaagattgggtgtatggttcttgctatgcctgcttatgggatgacagctaatcctttggatcagttggctgttcacgagtttgaaaatcaaaactatctcttctcagatatccatgcccgtgggaaatatccaaactatattaaacgctatttaaaagataatggtattgaaatacaattcgcttctggagatgaagaaatcttgaagaataccgttgattttatttcattctcttattatatgtctgtggcaaccgcacataatccagaagactatacgattggtaaaggaaatattatgggtggtgttgaaaatccctaccttgagaaatctgagtggggttgggctatcgatccaatcgctcttcgtctagttttgaatgacttctatgatcgttatcaattgccattgtttattgtcgaaaatggtttgggtgccaaggatgtccttgttgatggtcctgatggtccaacagttgaagatgattatcgtattgattaccttcaaaaacacttgattcaagtcggtgaagctcttcaagatggtgtggagctttggggctatacgacttggggaccaattgacttggtctcagcttcaacggctgaactcagtaaacgatatggcttcatctacgttgatcgtaatgatgatggtagtggtagcttggctcgttataagaaaaaatcatttgattggtataagtctgttatcgaaagtaatggtgcagccctttacaaatagaaaatcgttaagaatctcagcaaaagcttgagattcttatttagtattttagtacaactttgataaataagggttttagtgaatatgtttatttatcgagtattggaatactatttattataatttatgttaattaacacattttctgaaaaagtggtagaataaaagtgtgaaaacgttcttatattttctgaagaagtggctagtctatttctttgcttttcctacttagatggaggtaacgataatgaatgatttgaaaaaagttctcttggctggtattggcttgactgctatgacagtagataaagctgatagttttgtcaaagagttggttgaaaaggggcgtttgactgttgaagaaggtaaggaactagaacaagagcttaaacgtcaaagtaaggaagaagctcaagaattgttgaataaacttgatgctaagaaatcttcagttgagtatgcgactaaggatgatgtgaaacgtcttgaagaaaaacttgacgctttgctcagtcaaaataaataatatgtaaggagactaaaatggcaagtaaacgattgagacatgtgttgaaggttttctcgtcagttggtctcctttcttatcgtgaaaaacaccttcctcaagaccaacagacaacacctgtaaagctacgtcaagcctttgagcaattgggacctagttttgttaaaattggtcaaatcctatccacgcgctctgaccttttgccagaggcctatatcagagaattatcaaaactccagagctcagttcctcccttgaataaagaggaagtcatgactgccattaagagagaattacccagtgggctttctgacagtttccttgatttctcggaagagcccttggcttctggttctgtagctcagacccatagggctagattgttgtctggtcaggaagtgattgtaaaaattcagcgacctggtattgatgaggtcgttaaggaagatattcagcttctcattaagcttgcacgccatattccaaaacattttatacctatggtcgatgttcaggaggttttggaaaatctgcgagaaaccctaattaaggaacttgatttcagaaatgaagcagaggccatgaagcgtttcaaggcaaataacagggctgttgcttgtttaggtgtcccggaggtctatgattcctttacgacgccacacctcatagtcgaagagtacatcgatgggattccacttaatgactacagccaattgcttgaggctggctatgatctggaagatgtgggtaagaaactaatgctgtcatttatcaagcaggttttcaaagatggctattttcatggtgaccctcatcctggaaatctgttggtacgtgatggcaagatttgtttcattgactttgggattatgggtgagttggaagtggggatgcgtgcgtccttaaatgacatcctatatagttttactgctcaggatgttgacggcatgactaaggctatcttgtcagttacccagtttgataatgggctaaaccgtgcggttctaagtcaggatgtcgagcagatgctggggcgttattctggtgttgacttgggaagtctgtccatgacagatttgctagaggatttactggctattttccagaagaatcatcttaaggcttcctctcaaattaccattttggagaaggcttcgcttcaaattgaaggtattttccgagagttagccccaaatatggatttgatgactctggccaaggattatttcctagaaaatatgggccctgacatgcttaaacaggccctgaataaagagagtatcttgattgaactcttttatcttattcgcaatgggaaaaatattccgcgtcgcctgcatcagctattggagcagattttaaacggacgaattgtggtaaaccatgattttatcaacttttcaggtcgaattaaagtctttgagaaagttttaaataatttggttttagccttgttgacattgggatttctactttccggtgcccttttggccaataaatcaggttttgaaaatcttgcctggctatttcttggacttggaacttttctagctttaatcacggtagtgcgtataatatttaagaaaaaaggatgaagtatgattgaaacaactaggcccgagcttgtggcctatcaagaagagcgtttagccaaatttgtgactgaaaatcataagttagataaaggtcaaattgtttttgcaggggactccatcacggagttttttgcgttgaaaaaatatttaggtcgagagtttcccttggtaaaccgtgggattgcaggaacagactcgttttggcttttagaacaccttaaagagcaagttttagatttggaacccagtaaattggtactcttgattggtattaacgacatcggaaggggctaccccattcgagatattgtcaatcgtatttccgatattatcatgacggttcgacaagaatctctatttacagaaatttacttactgagtgtcttgccagtcagtgaaagaccagagcatagttcaaaggttaagattcgaaataatgcgaccgtacgtgatcttaatcaacaattagctgttctccctggtgtgacctatgttgatctttatgattacctaacagatgtccaaggacagttaaatgatacttacacaacggatggtttacacttgagtccacaaggttatcaagtcctagcagaaccaatcaaaaaggagattttagaatgaaggtaggcttagtccttgaaggcggaggtatgcgtggcttatacactgctggtgttttagatgcctttttagaagctggtattaaggttgacggcgttgtatcagtatcagctggagcgctttttggtgttaattacctttctaaccagcccaaaagagcccttcgctacaacaagcgattcatgggagaccgtcgctacatgagtttctggtcatggttgacaacaggtaacttcgttaataaggaattctcctattataaggttcccatggagttagacgtttttgatcaggaagcctttgctgattcggctgttcccttctatgtggtcactacagatattgagaccggcaaaccagactatatcaagatagaccatgtctttgagcagatggaagcccttcgtgcaagttccgccctgcctttggtttctgaaattgtcgagtacaagggcaaacgctatatggatggtggactgtccgatagtctccctattgattttatggaaaatttgggctttgacaaactcattgtcgttctgacacgtcctaagggctaccgtaaagagccatctaaaacgagtaagagaatctacaagcttttttaccgcaaatatcctgaatttgtccaagtagcatcaaatcgccatatccactacaataagagtattgaaaagattgaggctttggaaaaaactggcaatctttatgccattcgtccagagcatgcgcttgaagttggtcgattggagaaggatcctgaaaagtttgaagccatctatcaagagggattggaacaaatgcgaaatgagatgtctcatctcaaaacatttcttggagaaaactaaaaacgtgctcggttgagcacgttcttttagttattgatttgtctagcttgacggcgttctttgactttttgacgacgttttttctcattgataaaaattaagtagagcacgtaaagtggtaataagaggaagcagaacagagcaaagtgtttcataaagttatgcttattgcttgtttgtttgtccttctgaccgcctgaaaagaggaagaagccagttttagtcgcttttacggtagttgccttaattttaggtgataccgtttttagtccgttatctacgacgatagaatcatctttaacactaatcttaggctcttgtccttttttgactgtggcatagacatctttttggacatcgtattttttaccatcaatcttttgtttgcccttgcttagaactttcttgtaggaatagtctttaaacattttcccaataagagagttaccgaaggcatggcggattttttcgctcctttcgtcttcccaatttccaacgcctaagataactgaaatgacacgctgattaccacgcttacatgtggagatgtagttgtagtctccacgaggacttgagcctgtttttaagccatcgactcctttgagcccataatcagcaccaggcaaggagtagttgtaattttcaaaggtttcctcgtatggtgttccttttttgacagttactgtctgttggctagtgtatttaaggatttcagggtgatgtttgataaggttataagccatgatagacaaatcacgagctgtcgtctggttagagtggttattatcataacgtttaggcgtgtagtagcctttgtaagatgccgcaccagctccagaggcattataccatttagtatttgtcatgccgagctctttagacttttcgttcatgcgatcaatccacttgtcagggtcattatcactgagatagttggcaagcatgactgttgctgcatttgaagagggaacagctgtcatagtgataagttccgaaaccgtgtatttaactccagaaacaatcttgttgtttgaaatttcatagatattagcaatagcctcatcggttggtttggctgtaatcacggtatcttctttgatttctccctttgataaagcatcaaaaaccaagtagagagacatggccttactcatggaagcgggatcacgtacttcatcaatgttatcttgccaaaggatatcactagtattggcatcaatcaaaagtgatgatttaggcctataggtctcggtggcttccttgtagcccgctttttgtgcaatatctacaagttggtcagcggacgacagactgggagataaagctagactagctaccaggaagagtcctaacaatttctttttcaaaataatctccttagtaacaatgtttatatgctcttttaaaaggcatccattaatctatttttgttatatgtttgtaaaaaaagtcatactggtctattatagcatagttttgggtgattttatcagtattctttggggacttcctttaatagagtataaaaaagacgtgtcatggacacgctttcttttatttattgatttgtcttgcttgatgacgttctttgactttttgacgacgtcctttttcattaaggtaaatcaagtagatgagaccaactgggataaggcatagcaaccagaaataaactgggagttggccattatttgttgctttagtagcctttttatcttttgggttacttccaaaatcgaaccatcccttaactttagttgccttaacagaagtagccttgatcttaggtgatactgtcttcagaccattatcaatgacaatgtgatcatctttaacagagattttagggtctttgccttttttgactgtggcgtagacatctttttcgacatcgtattttttaccgtcgatttcttgttcaccctcgctaagaactttcttgtaagagaagtctttatacattttctcaacgagtgcattaccaaaggtatggcggatttcttcacctgtttggtcagaccaatcaccagaacccatgatgacagcaatcatacgttgatcaccacgcttgatagtatcaatatagttgaaggcaccttccgggcttgatcctgtcttcaacccatcaaccccatcaattccgtatttagctcctggaatagagtagttataagtttcgaaggtttcctcgtaaggtgttccctttttaactgtgacaacaggtttgctagtgtacttgagaatttctgggtatttcttgatgaagttataggtcatgatagccaaatcacgcgcagttgtttggttggtttggttgttatcataacgttgaggactgtagtaacctttgaaggcaacagcaacggcaccagaagcgttgaaccatttggtattggtcatccctagctctttagacttttcgttcatcatgtctagccatttatcaggatcattattggtcaagtagttggccagcatcacggttgtaacgttagaggaaggcaccgccgtcatagtgatgagttctgaaaccgtataatcaaccccagcaacaattttgttgttggaaatttcgtaaatatctgcaatagcttggtcggttggagtagctgtgataacagtatcttcagaaatctctcctttagacatagcttcaaagaccaaataaagtgtcatggccttagacatagaagcagggtcacgcacctcatcagcattttcttcccagaggacatctccggtatttccatcgattaaaagggtcgatttggggcgataggcctcagtggcttcagtataaccagcagcgcgtgtgatatccattaattcgtcagcactagacaaactcggtgctagggatagacaggctgctaaaaggacggcaacaattttctttttcacaatgtgtctcctttaatatctatggggttctgcagttggcaaaacctatttataaatgtatataaaacttatctgtcaatctcttaaatttagtagtgacaaacactttcattataacatataaaagtttgagttttcctaacatttggtattttaatgtaatttttagaatcgcttgaatgttagcaaaatatatttggaggcagaaaaaaacgagcgaacttgctcgttacttttcatcttttatcgttgttacttggtggtaaatcatgaaccaggtttcatttcgacgccagatactagtgtggaaatttcctcccaactcataactaattaatttcgttttttgactaacagatgtcatcttgaagctgtcaaagttattgagaagtggttgttgattggcgatgacttcttcacgagtgtgatgatgaccattttcatcgattaagtagaagtcaggtgccaagagattttcatagtcaggaatttttgacagaataatcttctcattgcgagagagtttgtggaggacattgccataaatttcgtcttcaggaatagcagcgggttctacatggacatcagtgtcatagacagagaaacgcttgctgaggacctcctcgatttgttcggtaatggcatgactctcgtaaacagagaggtcaggattcatttcaaccacaatatcaagatagacgttgctaccataagaacggccacgttgctttttaaccttagtgacttttggaatctcaagaatggctttttcataggccttgaggtttctctcatcgaaaccgtctgacaaactaaaggttgcttccatgaagatatcataggctgtctttaggatgaagaaggtaatgataatggcagtaatatagtcgataatcgtcaggttgaaggatgctgcaacgatagcgattgaggtaccaatagaagttacagcatcggagagattgtccttggccgcagcaatcagagcactggatttcagctttttagcaagtcttttattgtaaaagtaaacgccacacatgacgatagcagacaggataccaacagtggcaccaagtggatcaaccacagtttcctctcttagaaaaatctttcggacagtttgaatcaggacctggaaacctaccacgaacatgataaaggaagtgactagacttgataagtcttcaatcttccaatgaccaaacctatgatctgcatcagctggttgactagctaggtgcaatccaatgagtagggctacgttccccaaaatatctgacaagttattgaaaccatccgcaatcaaagagctagagtttaaaaagtgtccagctagaagttttgcaatggtaagaagaaggtaggcagcgatgctaacaataggacctcgtctggctgctcttaaattttcatacgtagtcataggattaccttttctgttaaaatacaagtttaaattatagcataaaactataacgagttaaaggttgtaagccctttaaacttgtggagtcactcatttttaaaactttatagaaaatgcctcgtaaccagggtgttttttcagtattttccgaatattccctacaaattatggtataatttagggtgtaaaacagtctaaaaagaggtttttatggaacattcgacatggcacaagcttctgaaagaggaactgccagatcattatttttcaaagataaatcagtttatggatcaggtttatagccaggggacggtttatccgccacgtgacaaggtttttaatgccttgttggagaccccatttgaagaagtgcgggtggtaattcttggtcaggacccttatcatgggcctcatcaagcacagggactatccttctcagtacctgatagccttcctgctcccccgtctttgaaaaatattctcaaggagttagaggaagatttgggtcctagaccctttcatgatttaacttcatgggctgagcagggggtgcttttgcttaatgcctgtctgacggttccagctggtcaagcaaatgggcatgccggtcaggtttgggaaccatttacagatgctgtgattaaggttctcaatcaaaaagatactcctgttgtctttatactttggggtggctatgctcgtaagaagaaagctctggttaccaatccaaagcatgccattattgagagtgcccatccgagtcccttgtcggcctatcgtggtttttttggcagcaagcctttttcaaaagccaatgcctaccttgtatctcaaggccaatccccaattgattggttgaagtaaaatagaaagttggaagattatgttactgattaaaaatggtcgtgttgtagaccctaagtctggtttggatacgcaagctgatgttcttgttgatggtaaaaaagtcgttaagattgcggataacatcgaagctggagatgctcaagtcatcgatgcgactggtcttgtggttgctcctggtttggtggatatccatgttcatttccgtgagccaggtcaaacccacaaagaagatattcatactggatccttggcagcggctgcaggtggttttacaacagttgtcatgatggctaacactaatccaacgatttcagacaaggaaaccttggaggaggtcttgacttcagcagctaaggaaaatatccatgttaagtctgttgcgactattacaaagaactttgatggtgaaaacatcactgatttcaagggcttgcttgaagccggtgctgtcggattctcagatgatggtattccattgaccaatgctagtattgtcaaaaaggccatggagctagctaaggagaataatacctttatcagccttcacgaggaggatcctgatcttaatggtattctcggtttcaatgaaaatattgctaaaaaagaattccatatttgtggggcaactggtgtagctgagtacagtatgattgcgcgtgatgtcatgattgcttatgatacacaagcacatgttcatattcaacacttgtcaaaagcagaatctgtaaaagtggttgaatttgctcaaaaacttggagctcaagttactgccgaagtggcaccgcagcatttctctaagactgaagacctcttgctctcaaaaggtgctaatgccaagatgaacccaccacttcgtttggaatctgaccgtcaggccgttatcgaagggttgaaatctggagttatctcagttattgccacagaccacgcgccacaccatgccgatgaaaagaatgtcgatgatgtgactaaagcaccatcaggaatgactggtcttgaaacatctctatctcttggattgacctacttggttgaagcaggtcacttaagcttgactgaactcttgaaagtaatgactagcaacccatctgatctttatggcttcgatgccggttatttggctgaaaatggaccagctgaccttgtaatctttgcggacaaagaaaaacgtcaggtcacagcagactttaagtctaaagcagccaattcaccatttgtgggcgaagagcttacgggtagtgttaaatatactatctgtgacggtgagattgtttatcaagcctaaataagggatcagagcagggcacatcgagacacttggtgttgcacctgcttttttagttcttgaaggagcaaaatgatgaaaaagatactaaaaggtcttgttaaatatgttactttaactgttctgttagtctgttttctgccgttgtctttgcagcacgttaaagctgatgaggtagagtatagtctgccttcctatgttggtcacctttcaattcaagatgatggtaatgcgacgtttacgcaggaagtgacttatgattttgatagtgattataaaggtcagtatgtaaccttggggaaaattggtggttattctattatggatgatcccaaggtttcagcaaccgtaaacgggaaagaaaaaacagatattacagttgaaaaaacagactcctatgaaggtgttaaactcaaagtttataattcaggttcagatggtgatagggttgtcctcaaagttacttggcaaatccaacacctgttgaatctatattcagatattgcagttttaaattggtttcctatctctgattgggataaaggatttggacagattgatttcacagttgatggtctagatgcaagtcaaggagagctttacgctcacgctggctattttggaaaagatccacaggttaagcgtacttctacaggttatcaggttcatgtagacaatttaccagcatcaggtaaattggaattacacgcctactggccgatgaccagtgctttacgagaaaataatcaggcttacttattaaataagacgaataaggcagactttctaaaaaaagaagcagatatcaagaaatctaaagaaaactttcgccgcattttttatgtcatcttaccacttgtgatcttaagctttgttcttattggtattttctgttacctcattgttctttatagcactaggatgccttctttccctcgagatgcccgtctttatgaagcccctcaaaatttagcacctttggtcctagccaagaatgtttataatcagtccttcgacaaaacaggtctaaaagaagaaacgggtcctctgaagtttaaatatatggtgcaagctaccatccttgatttgattgatagaggtcatctcacctatagacaagaaggtgatagtaatattctgacacgtattaaaaaggaggggctctcttcatttgaagtgtctttcttggatatgttgtttgatggtcgcatggaaattagagatacggaaatgttctcgcgctattatcttgataaagatgctctagaaaaacaatttaagagtgctagaacaagctatgagcgtgaagcaatacgttcccaaggaaaacgtgtcaaatatcaattcactaatgacggctatcaagtagcaaaaggcgtagaaaaagaggaatttgcgcttggacttcctaaaatttatagagattttagtccgaaagaaaagacatttaacctattgggagtagcagctttggtactttcaatgttgctttgtattctttcaaccttgttcttatttgctgcctttggatcaggactaggtttttactatattcttggccttctacctatagcaggagttaccattttattctggtacttagtgaaaagacgtcgtcagagatgtcttgatgcaactcaaatttcaacctattaccagtggcatagctttaaaaatatgattaagagtattcctagttttaaagaatccgaactagaatctgtcatcctttggaatcgtatcttggtttatgcgacactctatggacaggcgaaaaaagttagtgatgtcctaaaacgttacaacattcacctcagcaatccatctctagatgagtttacttattcagcagcaccatttatcatgatgaataatgtcaattatctagaatcttacgtttctgcctcagatagcgtaagtagcttctctatcaattcgaacagtggtagtggcggctttggaggcggtggcttctctggtggtggcggaggaggcggaggcggtgccttctaagcctactagtcggagtttactatttgtagagacactcagtctatatgattttgagtgtctttttgtttgtcgaagaattatccttgttcaaaaatgctaggaagtttgagagtgaagagataaaaagcaacaaaaaaagagccggtggctctttttcaatatcatcttaataaccaggttcaaagatttcaattatttgagtcagataacctgcatgtaagccgatacgatagtcaacatttggcaaactctttactatatcattcagttctttatctttgctaaccttatcagccaaaactggtaattcaacaacaaggagttgtgagtgatctagttgaaggtaactactattgaccttgacatcaggacgaagtagtttaaatatcgctctatccgaagcttggagcagttgatataaatcgaggtcagataaaggaatctcaccaaactgaggactaatattaatggaaatatcgacatgtgacgctctcatttccaaaatacgatttgaaagaaaactagctattattggattgctaagcctatccaagttttcttgagtctctggattaccaatgctagtattgtctgttttataaatctcaagtagactagtagctttggcagtatcttcattttccaaggcaagagaaacctccttgagatttttcttgaataagtcgaaggacgtttgcttttgcataataatctggataaaggctttgctatagttagtcatagtacccaacaatttatgacgttctttgttcagtctatcgatagattgttggtggacagcctggttccaattgtaaaaatcccatagtagtagggcaatatagagaactaagataacagaactattaggactgaccttgaaaactatttcaaataaatttttagggtcatttgctgttggaagaatactgttaagaccatggataacagtaaagaagacataatagacagctaggaaggcagtgcttcgcaaccagttacgtctagcccaagcttcgtcaagactactcatctgatttaggtctacagcgaagattttaagcattaggtaaatgattaatggtgctaagatgtaggtcaagatatgtaagttagtgttgagggtaatatcacctttgatatgtaagacgtgagggataatgacaattgaaagtagtcgtgttgccatatcaaaaaggatagttggataaaaagcgtaaagcaatcgatgatagaaagaacgctctttgacaagggccaaatcagcaacaaggaagaaaagtgggtccacaacgatttttacgagactaaagtaggacgctgcaactacataggataaaaatagaagtaaaaggtgtcctcgtagtggctttaccttagacatagtctggtagaggtaccaaatagaaatgaaactaacggcctgtaagagaggattgataatattagtaatcattgtaacctcctttagtcatgtcaatttcaatttgtaagcgataaatcccagtacgtgtatttgaaacaatgttaacgtttggataagtagatagaatagtattgacgcgttttagttcaggatcagagaaatcagatgtaatagctgaatcttctttagtgcttgaactttcaacgacaaagtgttgactatcctcatccttaaaataagcatagctaaggtatttctgttcactatcttgtgcttgatcaatgacatgatccaagatagttgataggacatatacccaatctaaaggataaataggataaacggtaatgggttctggaacctccatactaacccaaacatccaattcttttgcctttagaaatttagcttcaaagaggactcgcaaatcagggagtttaatattttcaagtttatctcgataaaaatgatcaatcttcttatctaacggattcggagtcagcaagtagtcaattaactcctgagcctcctcgttttgttggaaacggatgatatcgtagagattttcagcttcgtctttgatgaagagttcttggctagtttttttctggtaccaagtattgatgttctggcttgatttttgaagaagcagagaatgttcctcttgagctgcttgtgtttgtgcactgaggtcctttctatagagattaacctgtccagatagaatcagagctgtaataataagaaaggcaatggtaaagtgaatgtctgttgaaagaagttcagaagcaaagtaaataatggctagagcacaaagagcaacagaggttgatttgtaccatggtcttgctttatcaatttgcatcattcgagagtagtccacttgaagaagggcattttgagcgaaccatagcaaaaacgcaagcaaaagaataaatggaccagcaaaataataatctaggacagaagggaaaaagattggaataatcaggaaaattaccagtctcaccattaaggcaaaggtgaaaggtatgaaggaagtctccaaaatggtatgtctcagatttttgtaggatttgttagctagaaagagcacaagtgcaataaaaccagattttggaaagtaaataccaaaataactagaggcaaaaatgactaaagctgctaaaataagaatccagtatcttaaaggccttttcgtagttaccttgaagataacaatttgtaaaataaaagctatacatgccgtaagcccgtgaacgatgacgtcactcaatatcaaatattctcctattcgggtaaaatctatacaattatatcataatgcgctaaaaaaaagcatacggattgcctataagtgataaggttgtaaggcttttcatttttcaagcatatttcttgctcattaagtttttttaacctatcctagatgtatagaaaaatttcgatagaggagatcgatatggtaaaactttctaaagagacacatcttgagatgttcactaaaatggaacgtattcgtgaatttgattcacgtattaataaattggttcgtcgtggttttgttcaagggatgactcacttttcagttggtgaggaagcagccaacgttggtgctgttcaacacttgagctatgacgatatcttcttttcaaatcaccgtggtcacggacaatctatcgcccaagacatggatttgaataaaatgatggcagaacttgctggtaaagcaactggtgtttctaagggccgtggtggttctatgcacttggctgactttgaaaaaggtaactatggtactaatggtatcgttggtggtggttacgctcttgccgtaggtgcagccctcactcagcaatacaaagaaacaggaaacattgttgtggcattctctggagatggcgcaaccaacgaaggttcattccatgagtcagtcaatatggcagctacttggaaattacctgttatcttctttatcatcaataaccgttatggtatctcaatggatatccataaagctacaaacacacctcacctttatacacgtgcggaagcttatggtattcctggtttctactgtgaagatgggaacgatgtcttggctgtatatgaaacaatgggcaaggctgttgagcatgtccgtggtggcaacggtcctgctatcgttgaggtagaatcttaccgctggtttggtcactcaactgccgatgcgggtgtttaccgtactaaggaagaagttgacgagtggaagaacaataacgaccctattattaaataccgtgactatctcgtttctgaaaatatcgcaagcgctgaagagttagatgctatccaaagccaagttaaggcagaggttgatgcagcttatgagttcgcccaaaatagcccagatccagaactttcagttgcctttgaagatgtatgggtagactaaagagaaaggttgaggaatacaagtatgagtgaaacaaaattgatggccttgcgtgaggcagtaaaccttgctatgagcgaggaaatgcgtaaagacgaaaatatcttccttatgggtgaagatgttggtatctatggtggtgacttcggtacatcagttggtatgttggcagagtttggtgaaaaacgtgttagagatacaccaatttcagaggctgctatcgctggtgcagctgttgggtctgctattacaggtcttcgtccaatcgttgacttgactttcatggacttcatcacgattgcccttgacgctatcgttaataatggcgcaaaaaataactacatgtttggtggtggtttgaagactcctgtaaccttccgtgtggcatctggttcagggattggttctgcggcacagcactcacaatctcttgagtcatggttgactcacattccagggattaaagtggttgctccaggtaatgctaacgatgctaaaggtcttttgaaatctgctattcaagataataacattgttattttcatggaaccaaaagcactttacggcaaaaaagaggaagtaacacaagatcctgatttctacattccacttggaaaaggtgaaatcaagcgtgaaggaactgaccttactattgtcacatatggtcgtatgttggaacgtgttcttaaggctgctgaagaagtggctgaacaaggtatcaatgttgaggttgttgacccacgtacgcttatcccacttgataaggaattgattttcgagtcagttaagaagactggtaaacttatgttggtcaatgatgcttataagactggtggattcatcggtgagattgctgctatggttacagaaagtgaagcatttgattaccttgaccacccaattgtacgtttggcaagtgaagatgtgcctgtaccttatgcgcgtgtcttggaacaagcggttcttccagatgttgaaaagattaaggctgctattatcaagatggccaataaaggaaactaactttctagcgacggttaagtgatatttctcgctagtaaaatgtgtttcttgttttaactgtgggagtatcggaaattataatttaaagtagaaaggagagggcgttaaagcgtttgagtcgatttgaactcgaacgaaatgcttcggaatttagatagttttacttgtgtgcaagcacactaacgtaaaactcctaaaattctgtcgcattttagcgttcttagtatcataaaatatggcttttgagattattatgcctaagcttggtgtggacatgcaggaaggcgaaatcatcgagtggaaaaaacaagaaggtgatgtggttaatgagggagatatccttcttgaaatcatgtcagataagacgaacatggaacttgaagcagaagattctggtgttcttttgaagattactcgtcaggctggtgaaactgtaccagttactgaagttatcggttatattggagcagaaggtgaagttgtggctgacaaggcagctagcgcgccagctgctgaacctacgccaaaagttgaagaagttgccgctgtagcagagcctgtagtagcagcgcaaacgcaagcacctatcgttcacgaaggcggcaaagtacgtgcaacacctaaggctcgtaaggtggcgcgtgagttggggattgacctcgctcaagtaccaggaactggagcaaaaggtcgtgttcatgctgatgacgttgagaactttaagggtgctcaacctaaggcgactccattggcacgtaagattgcagcggaccttggtattgacttagctagcgtatctggaacaggctttggtggtaagattactaaggaagatatccttgcaatcagtgctccagcgcaagttaaagaagtggctgctgcacctgtggttgaagctaaacctgaaaaagtcttgccagaaggcgtggaagttatcccaatgtctgctatgcgtaaggcaatttctaagggaatgacgcactcatacttgactgcaccaacctttactcttaactatgatgttgatatgactaaccttatggctcttcgtaagcaagtccttgacccaatcatgaataagacgggcatgaaggtaaccttcactgatttgattggtttggcagttgtgcgtacccttatgaaagaggaacaccgttacctcaatgcatccttgattgacgatgctcaaaatatcgaattacacaaatttgttaatctcggtattgccgttggtctcgatgatggcttgattgtacctgtcgttcatggtgcagataagatgagtttgtctgagttcgttgtggcttctaaggatgtcatcaagaaggctcaggctggtaaattgaaggctgcagaaatgtcaggttcaaccttctctattactaacttgggaatgtttggaactaagtcatttaacccaatcataaaccaaccaaactcagctatccttggtgtttcagcaactattcagactccagttgttgttgatggggaagttgtcgtacgtccaatcatgggtctatgcttgacaattgaccaccgtattgtagatggtatgaatggtgccaaattcatggttgatttgaaacatttgattgaaaatccgatggaattgttgatttaagaaaaaatatctgaaaactgaagttttaatagaaaggagagggcgaaccagggggtgtaactgaacccgagcggaaagcttggaaaatagaccgtctgtctacgtcagcaggctgacgtgtcagacgcctaattttcagtcgctttctggtcgctcttggtatcttataaatggcttttgagattattatgcctaagcttggtgtggacatgcaggaaggcgaaatcatcgagtggaaaaaacaagagggtgatgtggttaatgagggagatatccttcttgaaatcatgtcagataaaacgaacatggaacttgaagcagaggattctggtgttcttttgaaaattactcgtcaggctggtgaaactgtaccagttactgaggttattggttatattggagcagaaggtgaagttgtggctgataacgctgctagcgcacctgttgcagaagcaactgctcagttggaatcagctggtcttgaagttcctaaagctcctgtccaagctgctccaacagctgctgcagaaaaagcacctcttgctgacaatgagtacgatattatcgttgtcggtggtggtcctgctggttactattctgccattcgtggtgcacaacttggtggtaaggttgccatcgttgaaaaatctgaatttggtggaacatgtttgaataaaggatgtatcccaactaagacctaccttaaaaatgcagaaatccttgatggacttaagattgcagcaggtcgtggtatcaacctagcatcaacaaactacactatcgatatggataagacagttgactttaagaactctgtcgttaagacccttactggtggtgttcaaggtcttttgaaggctaacaaggtcactattttcaacggtcttggtcaagttaacccagataagacagttactattggttcagaaacaatcaagggacgcaatatcatccttgcgactggatcaaaagtatctcgtatcaatattcctggtattgagtcacaacttgtgatgacatcagatgatatccttgatttgcgtgaattgcctaaatcacttgctgttatgggtggtggtgtcgttggtatcgagcttggtcttgtttatgcctcatacggtgtagaagtgactgttgttgagatggctgaccgcattattcctgctatggataaggaagtatctcttgaacttcaaaaaatccttgctaagaagggtatgaagattatgacatctgttggggtttctgagattgtagaagctaacaaccaattgacccttaaacttaataatggtgaagaaattgttgcagatcgtgcccttctttcaatcggtcgtgtcccacaattggatggtcttgaaaatcttaaccttgaacttgaccgtggtcgtatcaaagttaatgcttatcaagaaacatcaatcccaggaatctacgcaccaggtgatgttaacggaactaagatgcttgctcacgctgcataccgtatgggtgaagttgcagctgaaaatgctatgcgtggcaatgtccgtaaggctcaccttgactacacaccagcagctgtctacactcacccagaagtcgcaatgtgtggtcttactgaagaagatgcacgtgcgaaatacggtgatgttctcgttggtaaatcaagcttcgctggtaacggacgtgccatcgcttcaaacgaagcacacggttttgttaaagtcgttgcagatgcgaagtaccatgaaatccttggggttcatattattggtccagccgcagctgaattgattaacgaagcatcaacaattatggaaaatgaattgactgtagatgaactcttgcaatctatccacggtcacccaaccttctctgaaaacatgtatgaagcctttgctgacgtacttggagaagctatccataacccaccaaaacgtaaataaagttgataaaattctcggacagatgttcggggatttttcttttgtcacacattttcatctttagctatatcttgcaaatttctttggatttttagtgttaaatacgaataggtagttaaagggttttcaaataagataaatcacaattttatagagtttagaattttataatatttctgccttatttagaaaacttttaataatgacctttccatgagagtttatctatggtaaaatggttaaagtattataaaaatgcaaaaggaaagttaaatgcgaacgaaagattttatctactatgctagtgcggctgttctcttggctgtgacaactcaggttgctcatgcagatgaagtggcgacacaaacaccttctgttactgaaggaaatcagtatcaacctgcgacagcggctgagatttttggtggagaagcagccttgcctgcaactcctagttcaactgtttcagcacccgtagctacgagtgaggtggcaaaacctagtgctcctgcggtatctacgtcacttgcaccagaaagttcagaggctgtaacaactgcggcatcaacttcagtagctaactctactgttgctgtagcgtcaacttcagtaacatcttcagttgttagttcagaaagtgcaacagcttctacaagtgcgacaagttcggaaacgtcaaacagcgctgtagcaacacctgctaaattgacgaattctacggatgttccttcgccaacgcttaaggtgcaaccaaagacttttatcgatgtcagcagccataatggtgagatcagtgtagatgactatcgtgctcttgcacgccaaggtgtgggtggtgtcgttgtcaagttgactgaggacacttggtacaacaaccctaaagcaccctcacaagttcgcaatgctcaaattgctggtcttcaagtatcaacctatcatttttctcgatacacaactgaggaagaagcacgtgcagaagctcgtttctacatccaagctgcacaaaaactaaaccttccaaagagtactgttatggttaatgatttcgaagactctaagatgcttccaaatatcaaccgtaacactcaagcttgggttaacgaaatgcgtaagcatggatacaacaacttgatgttctacacaagtgctagctggttggatgagaacaatctaggctaccgtggacctgtctcaacctctcaatttgggattgagaatttctgggttgcccagtacccatcaacaactcttacagcaacaagtgctaagaacatgcgctataatgccaaaactggtgcatggcagttttcagctacggataatctcttgccaggtaaacatgtctttgaccacagcgtggactatacaggacgtttcacagcaaatgccagtgctgaggttgataacactcaaggcgatttgagtggaaccatttctattgtcaataataatccaactcttggtagctttgatgttgtcatctctaatgttaaggcaccaaatggtgttgaaactgtctctgttccaatttggtcagaaattaatggccaagatgacattatctggtatacggctaaccgtcaaaataatggaacttatacagtaaacgttaaggcttcagctcataaaaactcaacaggcctttataatgttcatctttattatattcaaaaagatggtcaattaactggtgttggtggaacaactacgcaagtcttcattggtaagacaccagagcagttgaaaccaaaagcaagttttgctattgaaaacaataatgctaaagcaggaacttttgatgccgttatcactaatatctcagcaccactgggtgtcaaagaggttttagttccatcatggagccttgaaaatggtcaagacgacctcatttggcataaggcaaccaagcaaaatgatggtagctatcgtgtaaccattaaggcaagtgagcataagggcaataaaggaaattaccgtgctgatgcctacatcgtggacaacgctaacaatcgtcattatattgccgaaaaagtagtgtctgtagattatgctcgaccaagcggtgttcttacaattgaaaacaacaatactgcagcaggtacttttgatgccgttgttcgtaatattgttgcacctacaggtttgaaagaggttcttgttccatcatggagtttggctggtggtcaggatgatctcatctggcacaaggccactcgtcaagctgatggttcttaccgagtgactatcaaggcaacggatcataagaattcaactggtaaataccgtgctgatgcctacattgtagatgactctaacaaacgtttctatctcactgaaaaagtggtagaagttactcaaactcgccctagtgcaagtctcgttattgaaaataataatgctgatttaggtacttttgatgctgttattcgcaatatctttgcaccaaatggggttaaggaagtcttagttccatcatggagtctagttaatggacaagatgatctggtttggcataaggctagtcgccaatctgacggtagctatcgtgtaactatcaaggcgtcagatcataagaattctctaggtaactaccgtgctgatgtttacatcgtagataatgccaaccaacgtcattatgtcactgaaacaattgtagatgtaaaacataataaaccagtaggtaccatttcagtagttaataacaataaagatactggtacttttgatgtcattatcagtgatgtttatagtcctaaaggtgttcgtactgttcaagtacctatttggtctgaaaaagacggacaagatgatattcgttggtatgaagcgacacgccaagctaatggcacttatacggtaaatgttcaagctactaaccataaaaactcaacaggcttgtacaatattcatttgtactacattttaaatgatgggtcacaagttggtgtaggagggacaacgacaactcttgaattccgtaatgctaagactaaaacgcaaacctatatcactaatgttaactcagaagcaggtagttttacagttgtagttgatcaagcgccacaaggacgtcagattaagaatatccgtgtagctgtatggtctgaaagcaaccaaggaaacctttcttggtacaatacggcacctactggaacacatactgaaatcaatgtttcgacggttaatcataagaatctcattggtaactatacgactcacgtttatgtagactatgcagacaatactgtagacggattcaaccttggtgagacagctcttgctccacgtaatcgtcgtgttgagcctcagacgacttattattctcaacgtgatcctcgttgggcttctaagtggtatggtgtcagtaatatggaccagtcaggctgtgttccaacatcacttgccatgacctttacagatatcttgggaactgtaattgcaccaacgacagttgcggattatttgtactacaatacaaattcattcaataaaacatcagttgctggtacagacgcggatggtattgtattagcaagtaaaaattggggtctcaagagcaacatgctttcaagcattgctaacattgcttcagctttgatgtcaggccaacacgttctggcagcagtaggagcaagccaatttatcaattatccttacacgcatgaaatcgtgcttcatggctatgataatggtaaaacttatgttcgtgatccatttaacgccaataacaatggttggtattcattggactacattcatggtgttcagagtcgagatgcaatggatactaagcttggtgcaccattcttctcaatctttgcttaatctattaatgaaaggtctttggaaggtaacttctaagggcttttttggtgttcatttttgatagtcatattttttatttatctattttcagaatattatatacatgtttgaaatctcatatttatgggcttttaggttctttatttggatgacattgatacttttagcataggaattacttatttttttatcatttttatagtttttttagagaattatcacttttgctctattcgtaagacattttctatggtaaaatgggtgacgtattaaaaagtgtcaaaggaaagttaaatgcgaacaaaagattttatctactatgccagtgcagctgttctcatggcggtgactactcaggtagccagtgctgatgaggtagctacacaaatgcctacggttactgaagggaaccagtatcaacctgcgacagcagcagaaatttttggtggtggggtagttcttacacaagagtcaccatcagcaagaccaagttcaactgttgcggaaacacctacagccacaagtgaagtagcaaactcaagtgctccacaagtcagtcaagcaagctcaacaacgattgtagcatctgaatcaagagtcgttgcctctgaatctgtagttcaggcgaacacagtagcgagttcagaaaatgcgacgataccgactgcttctgaggtttcaagcaatatcgtggctgaacctgctaagttaactcatgcctcaggttcatctcatgatactgatgttctaaaacctaaggctagcttctcaattgagaacaacaacaaggtcactggtacctttgatgctgtggttcgagatattgtggcacccttgggtgttaaagaggttcttgtcccatcttggagtctagcgaatggtcaagatgacttgatttggcataaggcagccaagcaaatggacggctcttatcgtgtaaccattaaggcggttgatcataagggggaggctggcaattaccgtgcagacgcctatgttgttgatcgaacaaataagagacattatatttctgagaaagtagtatcggtaacttactctcgtccaagtgcaagcctaacgattgaaaataataatacagctacaggcacttttgacgctgtggtaaaaaatatcattgctcctacaggtgtgaaagaaatcttagtaccatcatggagtctcgttggtggtcaagatgatttgatttggcataaggcgacgaagcaagcagatggttcttaccgagctaccattaaggcaagtgaccacaaaaattcaactggtaaataccgtgcagatgcctatatcgtagataatttcaacaagcgtttctatttgactgaaaaagtggtggaagttagccaatctcgtccaagcgcaagcctaacgattgaaaataatgatgcaactacaggtacttttgatgctgtggttcgcaatattgttgcaccaaatggcttgaaggaaatcttgatcccatcatggagtcttgttaatggtcaagatgatttggtttggcataaggcaagtaaacaagcagacggtagctatcgtgcgacaattaaggcttcagaccataaacattcaactggtaaataccgtgcagatgtttatctcgtcgataaggatggcaaccgtcagtatttgactgagaccgtggttgaggtcaatgaaactaagccaagtggtagtatttctatcttaaataacaatggtgctagcacttttgaagtggtcatcagcgatgtttatagccctaagggggttcgaacggtccaagtgcctatctggtctgaggctgatggtcaagatgatattcattggtatgaagcgacacgtcaaacagatggcaaatacaaggttactgttcaagtagctaaccacaaaaacgtaactggtctttacaatattcatctttactatgttcaaaacgacggttcacaaatcggtgtgggtgggacacaaacaagagttactttgtcagaacctagagccgaccttgctattactggtctcaacaatgctacaggtagctatgatcttgttatctcaaacttgattgctccacgtggcttcaaagaagtcttggttccaacctggtcagaaaagaacggtcaagatgatatcatctggtacaaggcaactaagcaagctaatggagactataaggtgaccgttcgttcaagcaaccataagggtgatagcggtctgtataattcccatgtctatttggttgacaatgatggtaaatacattggcctaggtggcaaacaagtgacacttgatattactaagactcaaggaaccttaactattgccaataatgataaaaatcgtggaacctttgatgttcttatcaccaatctgacgaatccaagtggtatttcaggtgtggttatcccagtctggtctgaacaaaatggccaggatgatcttgtttggcataatgccacaaaacaggatgatggttcctacaaggtgacgatttcagccagtcaacacaagtggaattcaggcaagtacatcgttcatggctatattgttgatgcttcaggtaagaatatcggctttggggcaacttcagctgatgtggtagcacctaagaaaatcggttcagcctcaagaggaaactacgatgttttaaataagattgtttacctcgatgctggtcatggtggctatgatccaggagcttcgtactttggtatctctgaaaagagcttgactttggctatccaaagtcgtgtgaaagctaaactagaagcagaagggtatcaagttgtaaccactcgcacaagtgatacctatgttgatttgatagatcgttcacgtgcagccaatgcttctgaatctgatatcttcgtaagtatccacatcaatgcttcaggaagttctgcagcacagggtattgagacttattattaccaaccttacgcagaatacccatcacgtattaatgcgacctatcatgctaatccgactcgtttgagcatgagtgataacttggccaatgccatccagtctagcttgattaatgcgactggtgctcagaatcaaggcgtgaaacgtcaaacctttgcggtcttgcgtgaaacgacagcgccagcagtccttctggaactaggtttcttgtcaaatcctcaagaagcagctcgattgaatacctctgcttatcaggagactttagctaacgcaattgtggcagggattaagcgttactattctatttataattaatagattgagagaatcttatggttctctcttttttaattttcaaagagagaaaacgcttgcataaacgaaagctaaatggtatattaaaaaacatgaaaacgttaacaaaaaggagtttttatgaaaagaaatactcaagctaatgatggaaaaatccttcgttatagccttcgcaagtacaagttaggtttggcttctgtaaccattggagctatttttttgagctttgctgcagttcaaggagtaaaagcagatgaagcagtatcaacgcccgactctagcacacaggtagaaccagctgaatctagtcttacgaccagtggtctagtaactgaaacgccagcagctcctgtaacagctgagaataattcagtttccaaggtaaatgagccagtttctcttccagaagaaaatactagccctactgagactaccaagctaactgaaactagcgaaaacacgccaaaaacagtaagtactaataatagtcaagctcttacgaatgcgtctgaggatcctattgctgaggggactattcgcttgcatttccaagagttgcctagtcaagacaagtcgtctcttggtctttggacttgggatgatgttgagacaccatcatctcagaaaggtgcctggccgacaggggccacctcatttgctgaagccaaacaggatgattatggtgtctatttagatgtgaagttgtcttcagcacctaaaaaacttagcttcttgattaataattctgctggaacgaacctttcaggggataaatcagtcgaaattcttagccctcaaatgaatgaggcctggattgacaaagatttccatgtttacagctatcaacctatccctcaagaccacgttcgtatcaattatttccgtacggatggtgactatagcaataagtctgtctggtattggggtgatgttaaggacgctccaagtaattggcctgatggtgtcaatttccaaccgaatggtaagtatggtgcctacttagatattccactaacacaagcggcaaaatcgataggatttttactcttagatgagagcaaaactggagatgatgtgaaaattcaaccaaatgattataaatttagtgacttgaaaaaatctcgtcagcttttcgtacgagatactgatccgacagtctacaccaacccttactttgtcaaggatgtgcgtttgactggggttcagcagcttagtccaagcaaaatcgaacttagcttcaccaacttagacgaggtctcatctgaggatattcttaaagaccttaaggtgacggataaggatggtaacagtgtcactcttaaacagcttgacttggatgctaaacttaaaaaagctactttaacaggtgattttgctgcagaaaatctgccttacaaggtcactttgggcagtgatagttttaaaacatctgagagctggcaattaaaggatgccctctacagttatgatggtgagttgggtgctcgactagaagaaaatggtactaaggcacatgtgacactttggtcaccaagtgctgatcaagtagacatcattgtctatgataagaataatcaagacaaggtgctggctgaacacgctctaagcaaaggccctagaggtacttggcaagctgacctccttgcgactgattttggccttgaaaacttaactggttatttctatcaataccgcattaaacgtggagatcagtcagtaattgttcttgatccttatgcgaaatctctggcagcttggaatagtgacgatgccaacaagggacctgaacacaagattgccaaggctgcctttgtagatcctgctaattatggaccaaaagaccttgactacgctaagattcctaactttaaatctcgagaagatgccatcatttatgaggctcatgtccgagatttcacctctgacaaggctatctcaactgaattgaggcaccagtttggtacttttgcagcctttgcggagcgtttggattatcttaaagaccttggggttactcatattcagcttttgccagtattgagctactattttgttaatgaattgcaaaatggcaagcgtttggctgcctatgcatcaagcgatagtaactacaactggggctatgacccacaaaactatttctctttgacgggtatgtattctgaaaaccctagtgatccagctaaacgtattgaagaattcaagaatttagttgcagctatccatgcccatggtatgggtgttatcttggatgtggtttacaatcatacagccaagacagctatttttgaagaccttgagccaaattactatcactttatggatgctgatggcactcctcgttcgagttttggaggcggtcgtctaggtacgactcactatatgagccgtcgtgtcttggtggattccattgcttatttgactaaggaatataaagtagatggtttccgttttgatatgatgggtgaccatgatgctgaaagtatcgagcaagcatacaatactgcacgcgcccttaatccaaatctcattatgcttggtgagggttgggtgacttatgctggtgatgaaaatagccctgttcagcctgccgatcagtcttggatgaaagacacagataccgtagctgtattttcagatgatattcgaaataccctcaaatcaggttatccaaacgagggaacaccggccttcatcacaggtggaaaacgtgatattaataaggtttttgataatatcaaggcacagccaactaactttgaggctgattcaccaggagatgttattcagtatattgctgctcatgataatttgaccctttttgatatcatcgcccaatcaatcaagaaggatccaagcaagcctgagaataatgctgaaattcatcgtcgtttgcgtctaggaaacctcatggtcttgactgctcagggaacaccatttattcactctggtcaggaatacggccgcaccaaacagttccgtgatcctgcctaccgttatcctgtatctgaggacaaggtgccgaacaagtcgcacctcttagttgatgaaaagggcaatccatttgattatccttacttcatccatgattcttatgattcaagtgatgcggttaaccattttgactggactaaggcgactgatagccaggccttcccagaaaatacgaaaacgcgtgcctttaccaaagggttaattgccttacgtaagtcgacggatgccttcaatttcaaatcaaaagcagatgtggatgcccgtgtgacactattgacggttccaggtcaggacaatgttgctcaagaggatttggtattaggataccaaacaattgcttccaatggagaccgttaccttgtctatgtcaatgctgatagccaggctcgtcagtttgatttgagcaagcttacaaatggtctatcctatatggttttagcagatggcaatcaagttaatctatctggaattagtgagctatcaggtgttgcgatcaacaatcacatcttgaccttggacccactaacagcgacgattattcgtttaaccaatgctcagacaccaactgaggaagtagctaagccttctgagaagactgtgtcatttggtggcaaagatactgaggtaactaaaacaagagtcaagacctcaagtccagaggaccttgtcggagatgtagagcttgttgctcatggcaataatcaggctaagactgaagctagtcgtcaaactgataagcaactgccatccactggtgaaaagacaaatcgtggactctttgtaacaggtctcttaagtattcttagcctaggattccttcgaaaacgtcggacaaaataataagtaacaacaggttatttcctgttgttttcttttatttagaatcattcttatctgctctttagaatagttcttaaatagcctaaaaccgttgacagtgctggtttcttctgttagtttagatatgttctcttacatacgagagatcattattgacttatcatcgttcgttctttattaatgttaaaacgacgattcacatatataacgacaaatgtcgaacactatcttgaaaataggagacattcatgaaaaaacttagcaaacttggtgttgttcttttggcatcaggacttttattgacggcttgtgccaaatctggtaattcaagtaattcaagctcaactagctcaaaactcacagccagtgagcaaaagcaattgaagcaggccacaagtgattataagactttcgtagaaggcgaaattgatcagcttttgaaagatactgaaggattcagtgaaaccctcaagtcaggaaatcttgaagaagctaagaaacaatacccattgattcgtatggcttacgagcgttcagaaccgattgcagaaagctttggtgagtctgacgtgaaaatcgactaccgtttggttgattacatggacgaaaataaatcagaagacggttggtcagggttccaccgtatcgaacgtatcatgtggcaagacaacacgacagagggtacagctgcctatgtagatcaattggttaacgatattaaggaactcaaagctaaaattgcaactgttaaagttactccagatatcatgttgacaggtgctgttgaccttctgaacgaagtagcaactcaaaagattacaggtgaagaagaggtcttctcacatactgatctttacgacttccgtgccaatattgaaggggcagaaaaaatctttgaacttttcaagccgttgatccaaaagaaagatgctaaacttgtgaagactctggaaactgaattcaagaatgtgaatggtcttttggacaaacacatgactgatgagaaaaactataagtcttatacagatttgagtgaggcagatactaaggaattggccgaagctgtaactaaacttggtgaaccattatcacaaatgggtgttatcctagatgggaaataagaaaaatgactgacgaaaaatttttagatcaaaaaatggaccgtcgtgaatttcttaaaaaagcaggtattggaggggctgggcttgcgcttggtctttctggtgcatctgcttttttcgctaatcaggatagttcaagtaaaaaggcttatgatggtgatgaagatattagcttctttggcaagcaccaagctgggattacgactcctatgcagaaggcttgctacttggtggtgctagatcttcatacaaccgataaaaaagaagtcatccagctttttaaagactggaccgattatagtagtaaattagtagaaggtgagctagtaaaaaaggatggttctaatgccctcttgcctcctacggatacaggcgaaacggtgggactcaatccctatcgcctgagtctgacttttggagtttcggctgattttcttaaaaaacttggtttagaatccaaacgtcctaagctcttccgtgatttgcctccatttcctaaggagcagttgcaggacaagtatacgggtggtgatatcgtgattcaagcctgtgcagacgatgaacaagtagctttccacgctgttcgcaatttgattcgcaaaggtcgtaataaaattaccatgaagtggagtaaatcaggttttgctgcaattggagaccgcaaggaaacgcctcgaaatctctttggcttcaaggacggtactgccaatgttacgacggaaaaggaattcgacaaggttgtctggactgatagtaaagattggatgaagggtggctcttatatggctcttcgtctggtacagatgcatttggagacttgggatcgtactaatttgcaggaacaagaaaacacctttggtcgttacaaggaatcaggtgctccctttggtaagaaagatgagtttgacgaagtagatttgtcaaaattaccagtcgattcgcatgtccgtttggctaaagaagtagaccttcctatcttacgtcgttcatattcctattcagatggcattgatgagagaactggccagtttgattcaggtttgattttcattgcctaccaaaaggatccagaccgttttgttaaaattcagaccaatcttggtgctgtagacaagatgaacgagtacatcacccatatcggaagtgggctctttgcttgctttgctggcgtggagaaaggaggctaccttggtcaagcactctttgaataaactcctcgttttacttgggcttttagccttattctggacctatccagtagctgctgaatcatacagtgacctctatatcaaaattacagatgcgacaacagctgttcaaaataaagatcaagctaaagctaaggaattggttgctgagattaagactgatttcgaaacaaaagaaaatcacgattccaaggcaggtaaaaaagttagcaaggctcttgatattaagggtgacgtgacagaagaggacctaacctccatttcgtcagcccttcttaaatttgagaaagagcaaaatcctgttgatttagatgccgaaaaggaaaaacttgaaacacgcctagagccttatttcaaaaacttacaggatgccattacggccaaagacctggctgcaacacgcaaaacttacagtgaattaaataatgcttggacgcgaaatgaagctgttgtccgtgaccacagtactgcctactacggcaagattgagacggccatttcacttttgcgaagtagcattgagacggagcctactgatttcaccagcatccagtcatcttatgatgatctcaagggtgggattgatgactttatcaagggtgtccctcttgatagcacaagcacaagtttaaccctaaaagatggtattaagctcttggaaaaggctctaggtcaattccaagcaggtgatgacaaaacggctgcggcaactatgaagaagttcatcactatctggccaaccattgaaggcgatgtaagcacaactaatccaagcctttatacgcgtgtggaaagtgaaacacctgttatcatggttaagggaaaagaaaaagtttatcgggacaaactgcaagccttgattacagacttatcagctatcgataccagtgcttcttataatgcctttgatgccatgttgattctcttacgtgaaggggttgaagccctcctcattgttatggcccttgtgactactcttaaggcagccaagatgcgtaagggactcaaatgggtttatggcggagccattgctggtgttcttgctagcgcagttatagctgttatcttacaagttgtctttccagctgtgacctcgggggctaaccgtgaaattattgaaggtggcgttggtatctttgcagttgcgatgatgattctgattggagtttggctccatagcaagtcttcagtcaaacagtggaatgactttatggaccgccagatgaagacggtgacggctactggaagctttgtgtccatgtttgcactcagtttcttggctgtcttccgtgaaggggccgagactattcttttctatgtcggtattattccacgtatcacgacagctaatttcttgattggtattgctctagctattgcagttcttgttatcattgctgtggctatgactaaagcgagtcactatattaaaccgcaccgcattttctttattttgacttggttgatttatgccttggccttcaagatgctcggtgtcagtgttcatgcccttcagttaactaatatgatgtctaatcatttgattagtggtttcccaaccattgattgggctggtatctatccaagctgggaagtcttgattccacaacttatctttattgctattattgtctttgtgacggtgaaacagcatggcaagaaataaagatgagatgactattgttgagcatctggtggaatttcggagacgtttcattgcagtagtgttatgctttttcctagttttttgtattactctgttgtttgctgggcaactctatgcttatctaaccagaggatttgacaagcctttattagttctagggcctaacgatattctttggatttacattaacttggctagtctcatggcttttacggtcactttgcctttcaccacctaccagatttggcagtttgtgaaacctggtttgagggataatgaagcgcgtgccatctttgcctatattccagcaacttttgtctgttttgtattgggtttggcctttggttattattttgtgagtccagctatcttagaagtgcttttaaagctaggtgaaggactctttgatacacaaattacagcacaaaactaccttagttttttactgcatacgacagtgcctttggctgttctctttgaacttcccgtagttgttagtttcctaacctctataggtatattgacaccagtatttctgacacgctatagacgctatgcttacttcattctcttggtattggcagtcgttctgacaccagccgactttattagtgacttggccatgactgctcccttaatcttactctatgaagttagcgtagctcttagtaagctcatttataaacgtaaacaaagaaaatataaagataaatagaaaggagatctcatgggaattctacgtgatatcggagccccaggacttatcattatcgttctaggagccctcctcatctttggtcctaaacgcttgccagaactcggtcaatctattggtaaaatgctagccgagtttaaagcagtcgtaaataaaactgatgatgataaaaaagacgaagaagacaagactaaagactaagatctctatctaaaggttatcttcaagtttcttgacaattctaagcttttatgacataatacacttgtattgaatagtaagtctatatcataggcaagaaaagaccccaagctaacttccacataagctcggggtcttttttagcactatctatccttgtttaaccacttgtcgatcagacgaaggataacaccgaccacaataggtccgatgatagttttgaatagtaaatccatcattggcaaactcacctcccttcgtaggcggtgtcgaggtgccaaaggatattatatcatagattgaaagagatatgtttagtgagtgataggaagtattagttagaatgtaggttaatcatgccaaacaaaaaatcagccacttgagctgatttttttatcttacaaactgatacgtttttctgtttcagcgtcgaagaagtgacctttagcaacgttgaaagtaaggttaactttttcacctggattatggaagtcacgcgcatcaacacgggcagcaaactcagtttctccaagttttaggtagagcattgtttctgcaccaagaagctctgaaacgacgacttcagcatctacattggcatctggatagacttcttgaacgattggacggcttgaaacatcttcaggacggataccaaagataacttccttgccttgataaccagtttctttcaagattttagcttgaccctcagagattgcaatatccaaaccttcagagttagtgatacggttgccatcaaatttgacattgaagaagttcatagcaggacttccgatgaatccagcaacaaatttattggctggctcattataaagttcttgaggggtaccaatttgttcgatacgaccgatagtaccagaaccatcaggatttttagtagaactcatgataacgatacggtcagcaagagtcatagcttctgtttggtcgtgggtaacgtagatagtagttgcaccaatattgcgagtaattttagcaatttcagcacgcatggtcacacgaagcttagcatccaagtttgagagtggttcgtccatgaggaagactttagcatcacgaacgatagcacgtcccatagctacacgttgacgttgaccaccagagaggtctgcaggcttacgatctaagaactcagtcaaaccaaggctagcagcagcttcacggacacgtttgtcgatatcatcttttttatatttacgaagtttaagaccaaaggccatattttcataaacagtcatgtgagggtaaagtgcgtagttttggaataccatggcaatgtcacgatcttttggtgatttgtcattaaccacttcaccatctatatagagtttaccttctgtgatttcttcgagaccagcaaccatacggagagttgttgatttaccacatcctgaaggacctacgaaaacgatgaattccttgtctttgatgtcgatactgaaatcttcgacagagtagtgagttgcatttgggtattttttataaattttatccagtttaagagttgtcatatcatttatcctttattatttaactgatccgccggttacaccttcaacatagtatttctgcatgaagataaagagaagggtgattgggatggcgatgataatagcacctgcggtaaatggaaggaaccattcattgatagcgtcttggttaagcatttgatagagtccaagggcaaccgtatatttatctttaacgtcaccgaggataacagatgcaaagatgaagtctacccaaggtcccatgaaggccatgagggcagtgtagacgatgattggtttagaaagtggcaaggtaatcttagtgaagatttgaagacgagttgcgccatcaatcattgctgattcatccaatgagtaaggaatggtatcaaagaaacctttcgcaatgtagaaaccaagagctgccccagcagaatataccaagaccaaagatgtcaaggtttgtgtcaaattgagggccttcaaaatgtagtagaccgcaatcattgacatgaatccagggaacatgttaagtacaagtgccaatttcaagaagccatttctgtgtttgaatttaatacggctaagtgagtaggccatacctacggtaatcaaagttgagaggatacatgtacatgtggcaacgatgaaagtattgatgaaccattttccaaatgggtaagcatcgctggtaaacagtttaatgtagttattaaatgtgtaagtcttagggaagaagtaaggcaccgcattagctccttcaccacggaaacttgtaaggaagatccaaataataggaatcaaccagataacagctagaactgtcaatagaatataagtaccagttaggtaaagatttttcttacgtttcattatttagcagccccttccttgaatgaagatgatcttgtgtaggccaagagactgaatgttgcagagatggcgaaaatcaagataccgataacagatgccaagttgtagtctttagcgctaacagtcagtttgtagagccaagttaccaagaggtcagttgaacccgcttgatagtattcagagttagtaggtccaccaccagtaaggaagtagataacgttgaagttattgatattaccgatgaattgttgaatcaacgatggtgccatgatcaagagaatttgtgggaaagtgatgctcttgaagatttggaatttgcttgctccatcaatttcagcagcttcaatctgctcagttggcaagttcatgatgataccagttgcgaccaacattgtgaacggaataccaatccacatattaacaaagataatagagaacttagcccagagagggtcagtcaaaaatggaataggcccattagtgagatgtaaggtttgaagtaaaccattcaaaggcccatggtcattaaggaagttacgcatcaaaagaagggatacgaactgaggaacggcgatagtgataacaaagagtgtacgccatactttcttgaatttaagccccttagtgttgagcaagagagcaaggacaataccgaagaagaaagttgttgctgttgcagcaactgcccaaatcaaggtccatgtcaaaagtgggaagaaagtaccagccatacgaccttgcaaaacctcaccaaaacttgagaaaccaacccagtcaaagagtgatttaggtgctgggtgattgtggtcaaagttagtaaaggccaaacagatcatgtaaatcaaaggcaagattgtgaagagcaaaactccaatcaatgggacagtcataagtcccatgtggaaacgaccatcagccaaggtcttgaagtcttcgataaagttaggaactttacgtccagactgtttgagagccatgagatgacgagcactcttaaggttacaccagtaaatataagcgaaaactgcacagaagattaatgatgcaagaccaaaaatcaacataagcattgaattatctccagcgacctgaacagtaagcttaaccccattaacttctttaatagcctcaccttgttcttgagtccccaaggtaatcatacctttaagcgcagggatgatttgaataacgaaggctactaagaaggcaatctcagaaaggaggaagagcaagcccttggtgaactgtttgttgaccaagtttgccaatcccattaccagaaaggacaatttgacatcccatgtaccttctttgaagacctggcgcataggagttgtgtcgtagattgtttgtgacatagatatctcctcagataaatgtttaattagtgatagataaagaggctaggaacctgacctgcctctttaccttctcatagttaggattcttatttagctgctgccaaatctttatcaaattgttgtaatttagtaaggaattgatcttccttgattttaccgttatatgcatcactcataagagcagcactttcagtccagaagactgacatttgactaagtttaggcataacagttgtgtactgatcagatgaacccatagtaattacagcttgtgcaagtgcatccttttgaacagcttcagaagcttgaacttctttgttagctgggatgatgtgacggtcttcattagtgaattggttattttgactgtctttgcttgtcaaagcttgtgccaattggtaagaagcagcgatacgttctgcgttacctttagatggtgtttggttaactgcgtaaagtttaacacccatgaaggctttttgttgaacgtcttgaccaccgatattaactgttgggtaaacagcaacaccaagattgtctttaccaacagctttagcagctgcagcgtagtcccatggtcctgattggaaagcatcaacagaaccatcttcgaatttagccatcatgttagctgaatcgacattaacaaagcctttattgtctttttgagctgcgataaacttaagaacattcacaccagcttcgttaccccagttagtaccattcacatcttcaccgttaggaccaaagagtgtgtcaccaactgaaaggaagagaggagcagttacataagcgttaacttctttcaagttgctaccaaatttagctttagaagtgattgtttcatatgatttcacatcttcttcattaagtttagatttgttgtagtatgtaacttgagtttcgataccgtatgggaaggcgtaagttttacctttgtattgagcacctacagcagcttgttcagtatcttgctcagcaatttcttttgagtattgctctgggatttcttggatagctccagcgtctaccaatttaccgagttggtcatgtggaagtgagaagacatctgcagcagtagaagcgtccttagtcaagttttcttgagcatttggatcttccatttcaaccatatcaactttgtaaccagatttcttttcaaactgtgctactgtatctgagtaagatttcttagcaccagttggtacccaaagtttcaaagtcttgctatctgagcttgagctcttgcttgagtttgagccacaagctaccaagagcgatccagccacaagtaatccagcactaccaagtaataccttttgccattttttcatttctatttcctccagaaatttagtttacgataaacattatgcaaccgtttccacaatctgtcaagtattttgtaaaaaaaaaaattattttttcgcaaacgattgcataaaacacccatctagtttataattgttcttatattttacgactataaagaaaattttatgagaatgagagggacataatggctacaattaaagatgttgctaagaaggctggagtcagcccatcaacggtaagtaggacattaaaggataactcggctatatcagaagaaacaaaaattaaagtaagagcagctatggaagaattaggttatgtaccaaactcagcagcacaaatgttggcaacaggcttaactcatagtttaggtgttgttcttcctcccttaacagaccgtgaaaatatcagccagcccttctatatggagattttaacagcaatcaatgaagaggctagttgtcattctcaggtcgttagtattgctacgggtgctactctagaggaattagtcaagcaagttgagctcatgcatcgccaaaaacgggcagatggctttataattctctattcagaaaagaaagatccggttaaagattacttattaaaacaaaaagtaccttttgtagtggttggagcagcagtggataatgaaaataaagtaacctatattgataatgataataaggaattaggtcatgaagctgtgaattacttacaggcaaaaggtcaccgaaagattggttttgtcacagacgatttatttgggcaagtaggacaggaacgttatcaagggtatcaggaagtggcagacaatctaaatttggatgtcttacctgaacttgtattttcagctcgaacaatcgagacttttaaaaaggaattggaaagattttctccgacagctttgattgtcaaggatgaccttatcgcccttcgtctcattcaatggctaaacaatcaaggaattagagtacctgaagattatgctatcatttccttcaataattcaacttttgcagaaatcatgcatccgttcttgaccacttttgatattaatatccaagaacttgctaaagaaagtgtacaaagtcttatgggactccttaagtcaactaagaacaagtcacagaaagtcatcattccatttaaacttatagaaagagaaagcgtcttaacgcattcataatatcttaaggagaatctaagtagttggttagtaaattagccggctacttttttattttatgtaagatgactattttccggaatttactagaagcctcggcttaaaaacactctctcaaattgtaagcgtttgttttgcgaacaattattcaagaaaaaataaaaaaatttctattttttcgctaaaaattcttgactaatgcaaacgtttgcattataatcataagtgtaaaaaataatttgaggtaaactttatggacaaacgagcaagcggtgtattgatgcacatcacatcacttccaggtgactacgggatcggatctttcggtcaagcagcctatgactttgttgatttcttgaaagaaacaaaacaaacttactggcagatcttgccacttactacaacaagttatggggactcaccttatcaatcattctctgcggtagcggggaatacacacttcatcgatttggatttccttattcgtgacaagtttctaactaaagctgatgttaaaggcgctgactttggatcagatccagagtttatcgactatgctaaagtttatgaagcacgtcgcccaatccttgaaaaagcagtaaaagctatcttggcagataaaaaagaagctaaaaaattcgaagcttttaaaactaaaaatgctaactggttagcagattatgctgatttcatggctatcaaagaacactttgataacaaagcgcttcaagattgggatgacaaaaaagcagttaaacgcgatgaggcaactcttgaaaaacttcgcaaagaacttgctgatgttatcacatatcaccaagtggtacaatacctcttctttagccaatgggcagaactaaaagcttatgctaacaaaaatggtattcaaatcatcggtgacatgccaatctacatttcagctgatagtgttgaagtttggactcaaccacatctcttcaaactagatgctgaatgtaaaccgcgttacattgcaggagttccacctgataacttctcagcaactggtcaactttggggtaacccaatctatgcttgggataaacacaaagcagaaaattatgcttggtgggtattccgtattcaagaatcattcaaactttatgattacttgcgtatagaccacttcaaagggttctctgacttctgggaaattcctggaggagatgaaactgctgaaaatggtgaatgggttcctggacctggttatgaccttttcaaagtggttaaagaagaattgggtgatcttaaaatcattgccgaagaccttggtaacattgatgataagacacgtaaacttcttgcagactgtggttaccctggaatgaagattgttcaatttggattctacgatactactggaaatagcattgacattccacacgtatacacacaacattcagttgcctacacaggtacacatgataacgaagtaatcaacggttggtacgacaacttgacgcaagagcaacgtgattatactgatgcatacatcaaccgtcgtcaaggtgaaccaatcacacgtgctcttcttcgcaccctctttgctactgtaagcaacacagctattgcgactatgcaggatatccttgataaacctgaaaatagccgtacaaacttccctaacacagttggtcaaaactggaaatggcgtatgcttccaggtgaaattactgtcgacaagaaagaatttttgacagacattacagaaagatataatcgaggtaataactaaaatggctacatttacacaatatgttgaagcaaaaaacaaaaatcttaaggacctttcaaacgaagaaatctactatcttttgttggaattcgtaaaagaagcagctgctccaaaaccaaaaaacgatagcaaacgtaaagtttactacatctcagctgaattcttgatcggtaaacttttgtctaacaacttgatcaacttgggcatctacaaggatgttaaagctgaattggatgctgctggtaaatcaatcagcgaaattgaagacgttgaaccagaaccatctcttggtaacggtggtttgggtcgtttggcttcatgtttcatcgactctatggcaacacttggcatcaacggtgaaggtgttggtcttaactaccactgtggtcttttcaaacaagtcttcaaagacaacaaacaagatgcagaaccaaactactggattgaagatcaatcatggttggtaccaactgatatctcttatgatgttccattcaaaaacttcacattgaaatcacgtttggatcgtttggatatcttgggttataagaaagaaactaagaactaccttaacctctttgacatcaatggtgtggactacgatttgattgataaaggaatcacttttgatcaagacgaaatccaaaagaacttgacactcttcctttacccagatgactcaactcgtaaaggtgagctcttgcgtatctaccaacaatacttcatggtatcaaatgctgctcaacttttgattgacgaagctatcgaacgtggatctaaccttcacgatcttccagattacgcttacgtacaaatcaatgatactcacccatcaatggtaattccagaattgatccgtcttttgacagaaaaacatggatttgaatttgatgaagcagtagcaatcgtaagcaaaatggttggttacacaaaccacactatcttggctgaagcccttgaaaaatggcctcttgactaccttgaagaagttgttccacaccttgttgttatcatcaagaaattggatgctatcattcgtgaaaaattcgaagatccacgtgttcaaatcattgacaaagacaaccgtgttcacatggcacacatggatatccacttctctacaagcgttaacggtgtagcagcacttcacacagaaatccttaaatcttctgagttgaaaccattctacgacctttacccagaacgcttcaacaacaaaacaaacggtattacattccgtcgttggttggaattctcaaaccaagaacttgctgattacatcaaagaattgattggtgatggttaccttactgacgcaactcaattggaaaaattggctgcctttgcagatgatccagcagttcacaaacgtttggctgaaatcaaatatgataacaaattgtctcttaaacgttatcttaaagccaacaaaggtatcgatcttgatgaaaactcaattattgatactcaaatcaaacgtttccacgaatacaaacgtcaacaaatgaacgctttgtatgtcatccacaaatacttggaaatcaaaaaaggaaaccttccaaaacgtaaaatcactatcatctttggtggtaaagcagctcctgcctacgttattgctcaagacatcatccacttgatcttgtcactttctgaactcatcaacaatgatccagaagtaagcaaatacctcaacgttcacttggttgaaaactacaacgtaacagttgctgaacacctcatcccagcaacagatatctcagaacaaatctcattggcttctaaagaagcttcaggtacaggtaacatgaaattcatgcttaacggtgcccttacacttggtacaatggacggtgccaacgttgagattgctgaattggtaggaccagaaaacatcttcacatttggtaaagattctgatacaatcatcgacctttatgaaaaagaaggttatgtaccacgtgattactacgaaaaagatgctaacatcaaagcagctgttgactttatcgtaagcgaagacctcgttaaagttggagataaagaacgcttggaacgtctccacaaagaacttatctctaaagactggttcatgacgttgattgacttggctgaatacattgacaagaaagaagaagtatacgcagcttacgaagatcaagatgcatggaacaaaaaagttgtttacaacattgctgaagcaggattcttctcatctgaccgtacaatcgaacagtatgacaaagacatctggcacacaaaataatattctagttgcatagaaggaaaacaagatcagaaatggtcttgtttttttgcatgaaaaaaacagcctatagataaattagctgtatttacataaataatgttatgttacctatgagtgataattcagtatatcattcatataggcttctttatttgatgaatcataagttttagatgttgtgtattttagataatggatttcattttttgcatttctggattcttcttgtaagtaagaatctgtaatggtaatcttaaaatcctcgctcttacctgttagatcaaggcttagcgggaaatttgtaaattcatctgagtaaaaggccatcttgtaaaagttgtacccatcacctctaaaagaatttaaatgaggaaattgtatattgtacatgccatcccaatgatttccatactctctaatatgataatcatcgaagaattcttgaattctttctttgttagcaaaatccttatcaaaggtaacaaagggagcctaccaatcccagagtgggatgtctccttcatttccgtagataatgtagctttgcatttttcctgatttaggattttttaaccgaaagtggtattcactgacaccatccttgacagcaccagtttgataaagggtatcgccaggaactatcataaacaggaagtcccttagatataactcgaagtcggcatccattgttttatcatgtaatccagggaaacgttgaatcatttgtctgtaattctctgcattcgaaaaccattcttcatcaaaacccggaccaacctcaaaaactttacgatcaaaatagcgttcataacggtcgaagaagttctcagtagaagtcacctgtccaaatggtaaagtgattttggtcttatcagtaaaagtgatatgcaataaaagtctgcggggatcaattcctttatcgacataatggccgaccttatatgtagacagattatcagggaaatcgtcttttccgaagtgtaggacctcaatctcaatatctttgacaacttttctttgaggtattatcttcttaacgctgtaattataggctttgtaatagtaattgtttttatcgtagagataaggcttataagctctttggtaggcattatagagaaacattccaagagcgaccaaaagaagcagagcaaatgctattttgacctttttatttattttattggttagtctcgagaaaaagagacttaatttactaggattttgtatcattccaaaactccccatatattttttactattatatcatgaaaatccttatagctaaggcgtcttcgtgtactttgtccccgttttcctttataatataggtatcacattacaagaggagacctcatgaaatatatcgtaaatacatcaaatgatcctgcctataatattgctttggaagcctatgcttttcgtgaattggtgaatgaagatgaattgttcattctttggattaaccgtccagctatcattgttggtaaacaccaaaataccattcaagagattaacaaagaatatacagatgctcatggtatcaaggttgttcgccgtttatctggtggtggcgctgtttatcacgatttgaataatctgaactataccatcatctctaataaggcggatgaaggtgcttttgactttaagactttctctcaacctgtaatcgccacacttgctgatttgggagttaaggctgaatttactggccgaaatgaccttgaaatcgatggtaaaaagttctgtggaaatgctcaagcttactataaaggtcgtatgatgcaccatggttgcttgctttttgacgttgatatgtcggttcttggtcaagcccttaaagtcagcaaagacaaaatcgaatcaaaaggcgttaaatctgtacgtgctcgtgtgaccaacatcgtcgacgaattgccagaaaaaatcactgtaaatgaattctcagataaaatcttggaaaaaatgaaagaattctacccagaaatgacagaatacgtcctttctgaaagcgaattggctaagattcaggattcttatgagaaacaattcaatacatgggattggacttacggacagtcaccagaatacacagtagaacgtaatgttcgttacccagccggtaagatttcaacctatgccaatgttgaaaattcaatcattaaatctgttaagatttacggagatttctttggtatcggagatgtatcagatattgaagacttgttggttggtgtaccttacgagtacgaagatgtcttggcaaaacttaaaactattgacacaacacattatttctcacgtatgacaaccgaggaggttgcaaaagctatcgtagcttaatcattgtttgaacaatctggaaaactctagattgttttttcttgggaaaaatctttcaaagtgaaataacaatatagatattttagcattggttctggaagtcagtatctgattgacctagtgtggtattttatatattcagatagtaaacctataaagcctctaagagaaaacaccctataacatctttccgaaaaactgtaattttcttgaaagaaagataagggtgtgatatacttctattaagtaactttggagaaaaacaaatgaaacgtgaactcttactcgaaaaaattgaagaatacaaatctcttatgccctggtttgttctggagtattatcagtctaaactatcggtaccgtattcttttacaaccttatacgaataccttaaggaatataaacgcttttttgactggttgattgactcaggtatttcagatgctgatggtattgcctcaattgacatcaaaaccttggaaaatctaactaaaaaagatatggagtcatttgtcctttatctacgtgaacgtccatctttgaatacctattccaagaaacagggtgtctctcaaacgactattaatcgtacactttcagctctatctagtctctataagtatttaaccgaggaggtcgagggtcctgacggtgagccttatttctatcgtaacgtcatgaaaaaagtttctactaagaaaaagaaagaaactctagctgctcgtgctgagaatatcaaacagaaactctttctaggcgatgagaccatggaatttcttgattatgtagaaaatgaatacgaagtcaagctctcaaatcgcgccaaatcttcgttttataagaataaagaacgtgatttggctatcattgccttgctactggcttcaggtgttcgactttctgaggctgttaatttggaccttaaagatatcaatctaaaaatgatggtcattgatgttactcgaaaaggcggcaaacgtgactcagttaatgtagcaagttttgcaaagccctatcttgaaacttatcttagtatacgtgataaacgctataaggctgaaaagcaagatgttgccctctttttaacggaatatcgaggggttcccaaccgtattgatgcttcgagtatcgaaaaaatggttgccaaatattctcaggatttcaagatacgtgtgactcctcataaacttcgacatactctggcaacacgtctttatgatgctaccaaatctcaagttttagttagtcaccaacttggccatgcttctactcaggttaccgatctatatacgcatattgttaatgatgagcaaaaaaatgctctagacaatttataattagctatcctaaccattccaatttggagtggttgttttttagtttacataaatttaattacgctaaagtctttccattacattgtcgaatacataactatatttatgtaaactatcatacataaaaaacaaactctccttcacggaaagcttgtttttcttattaataatctttaagagcagattcaacggctgctttttctttttcaatcaagtttactcgtgcagcaattgtcttaattcccattaagatattacgttccaaggctttatcacttgtttgtggctcgaagaaagcaatatattgatcaagacgttcttgcgttttaaagattgatgctgggatattaacaaagctatcaaagctcatatcaccaccaagggctgctttaatccaatcccagttatcttttgcccagttccaaacggtttcttgagcaaaagatttgctgaggaaattcatataccaaaggtacaagtcttgaggtttaacgacatgtttgtctttaagctgactaagcacgtagtcgaagccttcttgatttttaaggtatgaaactgcttgagttaattgacgacggaagttactatcatttgttgtgacgtatgcgttgacatagtcctcaacaagggtaagactgtcttcttgtttcatttggttaattaggacaagaccacggacacttgcggggatgctttcaatgttttctttatgagcttggaaaacacttacggctgcaaggactgctggttgatagtctgcttgaatcaagtagctaagtgccgtttgacgaaccatttcattttcatctgactctccatctttggcatcgaaaccaagacgttcaaagtcgttttggaattgacgacgtaccaaagctttgtagtgcacttctgcttctgtgtcctcatcgataaagcgtttcaaaccagcgaggatttgagacttagcttgcgcaatcaagaagctttcttctttttcgacaagatcaagaagagccactaggcttgcataggagatacggccactttcagcaagaagacgacgttcttgcaaaatttgaagtttacttacagtatcaaggttagcaaattcctctaagagttggtccaagagttgtccttggtagtctgtgatgtaatgtgccgtatttgctgtattaaggcgaagagctccattattttcagcagcaagctggctataatttggaatctcaatacgctcttctgaaagtgtgtctggaagtccgttccaatttgtgttcaatggaatttcccaaagacgccctttatcttcatgttcaccaatgaagaattgtttttgactaagaataagagtgtcatcaacaacttctgcagtaacaacagggtaacctggttgctccaaccaagtatccatgaaactagagacatcttttccagaagcatcagagagtgcattccaaaggtcacgtccaatagtgttgttgtactggtgtttctcgaagtaagctttaagtcctttagcaaaggcttcatcacctaaccaacggcgaagcatatgcatgagacggctacctttggcataaacgatagcactatcaaagagggtgttaatctcatctgggtgattaacttccatgtggactgactgaacaccatctgtagcatcacgctggagggcatgaggcacaccagttgtttggaagtcttcaaagatgttccagctaggttcaatggcatctactgaaacatactccatcatattggcaaagctttcgttaagccagagatcatcccaccatttcatcgttacaaggttaccgaaccattggtgagccaattcgtgggcaaccacaagagctacttgttgacgacttgcagctgagctattttcgtctactagtaggtaaacttcacgataggtaacaagtccccagttttccatggcacctgctgagaagtcaggaagagccagatggtatgacaatgggataggatatttgacttggaagtagtcttcgtagaaatcaatgacacgaacggcaatatcaagggcaaagtcaacgctgttttcagcttgtgcaactgtagcgaagacaccaacttcagttccgttttgtgttttcgcagtcttaccttgaagagcaccaaaaccaaaggcaaggaggtatgtagacatacgaggggttgtctcaaaagtccaaaccccagtttctttacgtagatggctattgatttcaggcatatttgacaaagcgatatcgccttcttcagcatcaaatttcaatgagaaatcaaaagtagctttggcttctggttcatcaacagatgggaaggcttcgcgcgcaaaatgagattcaaactgcgttgaaataatttctttcttctcaccattgtaggtgtaatatgatgggtaaatccctgtcatattatctgtaatacgaccagagaattcaatgacaagcgtcaaaacaccggtctctggaagttcaatatggaaggcttcgttagcatcatccatttggaagtttaatgattcattatccaagagaacggaactaatggtaaggtctttttggtgaagggagatatggttatcaagggcttcacctgtgatggcaacattccctgtaaaggtcttttcagaacgattaatgtccaagaaaagattgtagttttcagggatgaaactttcgataaaacgagcaacagatgctgtcatacgtatatactcctaatctaacttttcgtatcgaaacagactgacaaatgtttcgatatcagacccttttgcaaaagaaaagggtctgaattattcaatacagacccattataacatagattggaagctttgcctacagttcaatgattttaccagacttgaggtagacaacccactcgcagagattgcgggcatagtcaccaatacgttccaaatacataagtacttggaaatattctttggcagcgaaggcagcatcaggattcttgcgaacaccttctactgtcatggcttgaatatcacggaaatagttatcaatgatttcatctgaagctgcgatttcataagcgcgttgttcgtcactgttcaagtaaacatctagagcatcttcgaccatgtggcgaactgccttccccattttcttgatttcagcttcaatttcagttaggcgttcctcacctttaatgcggatagttgcttgagcaatagcaacggcatggtcacccatgcgttcaacgtcactagatgctttgagcgctgtgatcactgttcgcaaatcacttgatacaggttgctgaagagcgataatttcaagcgattttttctcaagtttggtttcgtagttattgacgatttcgtcattttcaatgacttccttagccaaatcacggtcatggctgataaaggcacgtacagctttcttaagctgagctgcaacctctgtacccatagcgtaaaattggttgtggagtttttctaattcttcttcaaagggagttcgtaacatcataatttttttagtaatctgtcctttcttaaccgaatttaccggtaatataatcttcagtttctttatgttgtggatttaggaacatgtctttcgttgatgaatactcgatgagctctccatcaaggaaaaaggctgttcgttgtgaaatacgacttgcctgctgcatagaacgagtgactagcaacaaggtgtattgttctttaaggttatagagggtttcctcaatcttaccagcggatatagggtcgagggccgacgttggttcgtcaagaaggataacctttggagatgtggctagcactcgagcaatacagacacgttgttgttgccctcctgaaagtccaagtgctgagtcatggagacggtctttaacctcttcccagattgaagcaccctttagtgattcttctactgcttggtcaagaacagccttatctttgataccattgatacgaaggccataaaccacgttttcatagatagacattggaaaaggattgggttgttggaagaccattccgatttctttacggagttcaacggtatctgttcgaggactgtagacattgtgaccgttgtatgaaacagcaccagtaagtgtccattcgggatttaaatctcccattcggttgatagaacggagcagggttgatttcccggatcctgaaggaccgataagggccgtgatttcatttggatagaaatccattgtcacattattgagggcttttttcttattgaaatacaccgataaatcattgattgaaatgattggttcagtcataagtgctcctttctatccaaagcgtcctgatacatagtcattggttgactgtagggaagcatcttggaagattttcttggtttcatcatattcgataagatcaccaaggtagaagaatgctgtataatcactagcacgcgctgcttgttgcatattgtgcgtcacgatgataatagagtaatcttccttaagttcaaacatggtctcttcgagctgcatagtagctacagggtccaatgaagctgcaggttcgtccatgaggagaatctgcggtttcacggcaatagctcttgcaatacaaagacgttgctgctgaccacctgagagggtaaaggcagatttatgaaggtcatctttaacttgatcccaaagtccagcttgcttaagtgatgtttcaacaatctcgtccaaggtttgcttatctcttacacctttacgttcgtgagcaaaggtgatatttctgtaaatagacttggcgaatggatttggacgttggaaaaccattccaatatgtttacgcatttcataaacattgatattacttgcgttaacatcgactccttgataaaggatttgtccagtaaccttagcaatatcaatcgtatcattcatacggtttagactacgaagaaaagttgatttaccgcatcctgaaggcccaataagagctgtgattttatttttctcgaattgcatgtcaatgcctttgatagcttcattttgaccatagtagacatgcaagtcctttgtttcaagagcgagctccttctctgggaaggtgataatatgacgctcgtcccaattgtattttgtcatgataactcctttaagcggatgttaatttcttatggaggtaagctcccaaacgacgtgcaccaaagttgaaaatcagaatgaaaatcaagagtactgctgctgaaccagcagatactgcagtggcgtcaggtgtcgtaccttctgagttgaccttccagatgtgaacagcaagtgtctctgcttggcggaaaatcgaaattggactagagatgctaagcggattccagtcgctccagttaagtgctggtgcagattgacctgctgtatagataagcgctgctgcttctccgaaaatacgaccagaagcaagaacgataccagtaacaataccaggtaaggcttctggaacaacaacgtgacagatagtttcccatcgagacaaacctagagctaggccagcttcacgttgggtatggtgaacggttcttaagctatcttcaaccgtacgagtcatttgtggcaagttaaagacagttaaggccaaggcacctgataggattgaaaatccatactgaaattggacaacgaaaatcaaataaccaaagagtccgaccaccactgaaggtagtgaagataggatttcaatacaggtacggacaaagttggtaagtcgtccttttttagcatattctgataagaagatgccagctcccattgaaagaggcacagaaataatcaaagtaataactaataggaagaatgagttgtagagttgaaccccaattcctccaccagctttgtaggaagatgatcgactagtcaagaaagaccagctgatgtgtggtatcccgcgaaccaagatatagagaatcaaggctgccaggattgttacaataatgccagcaatcacataaagcgtgctgatggcaattttatcaatttttttagcgttcataatttctctttctctcacgggtaatgaatttcaccaacatattgaaaccaagactcatcaataagagcaccaaggcgagagaccaaaggacattgtttgaaacagtacccatgactgtattcccgattcccatagtcaagacagatgtcaatgttgctgctggtgtcgttaaagaagttggaatcacggcggaatttccgacaaccatttggatggccagagcttcaccaaaggcacgggccataccaaagataacggccgtgaagatacctggtttagccgcattaagtgtcacacgccaaatagtttgccagcgtgtagcccccattgctagactagcttcacgatagtgacgaggcactgcacgaagcgtatctgttgtcataaaggttacggttggtagaatcatgacgaacaagacaaaggtacctgaaagaataccaaaacctgttccaccaaaaattaagcgaacaaatggaaccacgacttggagaccaataaatccataaacaacggatggaatcccgaccaaaagttcaatagcgggttgtaggaatttagcccctttaggagaaatctcagtcataaagatggctgctccaatggcaaatggggttgcaaccaaggctgaaagcaaagtcactacgaatgatcccaaaatcattggtagtgccccgaatttgccttcagatggtgaccaatcaccactaaagagaaactcgaccaagctaactttattgacaaagaaagtcgccagccctttttgagcaacgaaaagtaaaatcatcgccacgatgaaaacaatcaaggccaggcaaaggaaagtgattgttttaccaaacttttcgaggcgtgaatttttagagggtgatgttaattgtttcaccaattcttcatttttcatgcttactcctcactcttctttgtaaccttgccgtcagcatccttggtaactttcatgctatggatggaaatgtaacccatttttgcgactacgttttcttggacttcgtcactcatcatataatctaagaattgtttggtatagctatccggttttcccttggtatacatatgttcgtaggaccaaatcggccaatcgttagttgcaacattttcagcttttggttcaaatccatttaacttcaatgttttaacagaatcatcaaggtaggcaaatgataggtaggaaatagcacctggtgtctgagcaacgattgacttaaccataccattagaatcttgctcttgggtacggattggcgatttgccgtccataatcactgcatcgaaagtcgcgcgtgatcctgagctagctgcacggttaataatagtaatctctaggtctttaccaccaagctgtttccagtttgtgatttccccagtgaaaatcttgcgaagttgttcgcttgtcaggttatcgacagagacttctttatttgtaatcactgcaattccagcaacagcaacttgatagtcaacaagcttactggcatcgattccagatttttcctcggcaaaaaggtcactgttaccaatttggacggcaccggattgtacttgagaaagtccagtaccagaaccgcccccctgaacgttaacgatattgtcagggttcttttcagcgaacccatctgctgccgcctccactaagggttgaagggccgtagaaccaactgctgtaatggactggccacggtcaatccaagaggcacagccagttaaaaccagcatggccattgccagtgacagaatcactgcaaggacttttgtttttttcatttttgtcctccgacattttgtaacataagtaagaatgtgtctcatagatatgctgttaaaagatacctatctaattataacaagtataggataattaagtcatattaaagtttggttacaggttcttaaatgtgaaatcttaatcctttaggatagaagtttttaaccgtatttccaacaactttagcaaacccaaaaccattgccgtccactaaaagctgataccaaccattaggatgtgtttgatctagagtaaccacattaccagaaacgtattgggcaaactggtcttgacttagctctatacttgaaacaacttcatcagatgttaaagcaattccaagagcaaaacttggttcgaaacgttttttcttgaagacaccaagatgcaaaccgttacgagcgattttaactttagaaaggtctgggagcccttttggaagcaggtagagattgtccccaaaaacttgcagtaaaccatccagtctagttttaaggtgtttttttgcaaactcttcccaaagttgcttctgctccttgtttaggttagattttccctctttgatacgtgtttgctcagacacacgcttatcctggaattttgccacaaactggccttcacccttgaaatggtgtggatacattcgagctgtttccggaaaatcaattccatcactcatgccattcaatttagggattgccaccaattcaagatcaggattattttctaaaatccaagcaacaacaccttcattttcctcaggagaccatgtgcaggttgagtagatcaattgtccaccaggagcgagcattttcaaaccgtctgataagatgtccttctgtaattgtgccagttcactaggatactccttatgccaatattggattgcatcaggatccttacgaaacattccttctccagaacatggtccatcaaagacaatcgtatcaaaataatttttgaaaactttggctagtttatcagctgacgtatttgtcacaataacatttctcgctccaaaacgctcaatgttttcaaccagaattttgctacgctttggattgatttcattgctgaccagcagtcctgtattatctaggtaactaagaagatgagtagactttccgcctggagcagctgccaagtctaagacgcgacttcccttggatggagctgccacttgagcaaccatttgagcagctggttcctgagaataaaccaaaccagttgcatggtcggcagattttccggaaattttaccgtaatggccccaaggtgtttcagggatagcatcaggaaagtccttctgttgctttttcaaagggttggtacggtaggcggatacggcttcttgatcaaaagatgcaaagaagtcctcagcttcatctccaaggagcttattatatttttctataaagtctgatggaaattgcatagtttcctttctatcaaaaaactggactaaccaagagaacttgctgttctgatttgtccagtatggttttatgtttcaaattaattttctgagcccataatatgcttgatttcttcaagtctgtctttagggacaagcatcacagcttgacgactagaataatctagtggttctccagtaatggtctcaaggcgataacccaatttttctcccataatacttgctgcggcatagtcccatgggtaaataactgaaaagtaagctaaaatttgaccagataggacttttgacatgcttaaaccagcaccaccgtagacacgaacgcccaaggtcttatcaataaggtcttttaagccgtgaaaatttttagcatacatagctccattgctagcgactaggcaacggtctaaaggtcggtttttatatgctggaagcaacttttcattacaatacacatcaaactggccaccaccatagaaaagttgatcagccatgacgttataaatgaggccaaattttccttgcccctcttcatagtaggcaatcataacacaaaaattatcttgttggacaataaaattgaccgttccatcaataggatccaagacccagacatttccatctttaatattatgaaccaagccattttcttcagcgaaaatattgtctgaagggaaggaggatttaatacgtgccacgagtaaatcttgtgtttgtttgtcaatattagttactaaatcatcaaaagccgtcttttcttcgactgtgatagttttactcaaactttctttaataaaagcaccagcttctttgatgatttctttggcgaaaatcagtttattttccaagtgatacaaatcctttatcttttgctttagcagctttgacagcttgataggttgaaaaaccgctagcttcttcaaaggccttgtctagttgtttttcaggcgctttgcctggaacaacggttttaaatgccttataggcttgcaagagttggtcacggtcaaccttgctctcgtatgctttttctacctgactcaaaaaatgaagcactgtggtaatttcctcagtgctccatgatggatcgagtgggtaggaataatttcctttagtcattgttaccctcaatttcagctcgaatggtcgcttggcgcaattcttgctttctataatcacgaggcaaaaaggcacgaatttcatcttcgttgaaaccaatttgcatgcgtttggtgtccataatgataggtcgacgaagaagatttgggtattcagaaatcaattgaatgagttccttgatggtcaaatcatccacatcgatattcagcttctgaaagacttttgaacgagttgaaatgatatcttcagtaccattttccgtgtaagacaaaatcttcattaactcatcatgagttaatgggctcgtgataatattgtgttcgtcaaaagcaacttcatgattggtcaaccaggctcgtgctttcctacagctggtgcagctaggtgataaaaataaagttaccacgcaaacacccctttcactttaacattcctaatcattatacattatttgattagttttggctacgctttcttaaaatttttccgcgatttttttatcagcctccagttgagcacatagttcatcgatattattgaacttaatcatatcacggatataatccagccaaaaaacttcaattgtctttccataaatatcgccttcaaaatcaaagatattggcttcaagacgaagttctgttcccccaaaggtaacgttttttcctaggctagtcatggaacgatagcgtttgccatcaattacaacatcggcgacatagacaccatcagctggtagaaaagtcctatcaataggtgctaaatttgctgttggaaaaccaatggtacgtccacgggcatcaccatgcaccacgatgccacgtgtagagaattcatggccaaggagtttattggcttctttaaccttgccttctcgtattaattgacgcacacgtgttgacgaaatcttttcaccatcgctttgttgctcctcaatgacatgaacattaccagaaaaattacgggcaagatagtccgcatctgttcgatgatgtccaaatttgtaatcaaagcccacaacaacctcttgggcttttagacgtttaatataacgagcaatgaaatcgtctgaacttgttcgagcaaaatcactattgaaatctgttaaataaagctgatcagtaccataggcttcaaaaagatcacaacgtctctgaggtgctgtgatatgaaggaggagatcatccgtatacctttgaaaagtcaattgaggactctcattaaaggtaaggacagctacttcaagctgtttttcatcagcaatctggcgcgccttatcaaaaaggaccttatgaccacggtgaagagcatcgaaataccctaagacaagaaccgtttccttttcctgatggatatctttataatcattaatagaagttattttcattgacttaatacttttctaggtttataaacttgatttcgcttttccatgatggctagaaccttgtctcctaaaaaggccgcaactaagggttcttggctatcgatagtaataaagcgaccaaatgaaatttctttagcatcatcctcagtgacttgaacagctggtaggtcctgaacaccaaattcgatgggaaggaggaaggaactatcccccgcttctaccatttctgaaatttgtgagagtgttagtgcctcatctaaggttagaccagctgaggctgttcgacgaagagcggacatatgactcgcgtatccgagtttagcacccaaatcgacagataaagtacggacataagtccccttgctacaagcaacacggaaggtgaattttgcggtgttgttttctagcgcgatgggtgaggtacggacaaattcagtaattgtcacttgacgttgtggacgctctacttcttctccagcgcgtgcgtactcataaagtttctttccgttgaccttaaccgctgaatacataggaggaatttgtgtgatttctccctcaaaactagccattgccatatcgacggtttcttcatctaactctgtaacaggagttgtttgaacgacatctccactagcatcctcggtagttgtagaaaatccaatggtaatttctccctcgtagaccttacctgcttctgtcatgtattcaataacacgagtagcttttccaaccgctataggtagaacaccagtaacatctggatcaagagttccgccgtgcccaatttttttctcatgtaatattttgcgtagtttaaaaacagcatcatgactggtcatcccagactctttttttagattaataattcctgaaatcatacttttaattatatcaaaagcaatcctaaagagctaggtagaaacataaagaggcagagagcaaagtctcaacccccttaagtattatagtcataagcaatcgcaggcctgctagctttttaatcgatatctctattaaggtcgctttccaattcaaagaaaggctgaatatcctgcacatattctaggacaccctgaaagtctctcttgtcatctctaacagctgcataggtaacataaacgaatttccctaaacgttcagatttgaaccacattggaacttggtcacgctccccactcttcagtaattcaaagattttcttgaccttatcaagtacttttggcggatgacaaagttcaacgtttcgtccaatttggctaggtgttcgtttaaaaaccatctcattggcgggaacattatcattatagtactggaaaatatcgtctttattgacgaaagtgatttccaaaggaagatggttgagaatgagattggcctgctccacagaaagataaccattgccaaaaggctgagtcgtttctctatctacgatagtttcagtttttggttttggagtgaagctgatggtgaactgcccttcgggagtgtcaataattcgggtattgtccagatgttcgtcactacttagttcagattgttcttgcgatgtatcagcatttacctcctcaaaacgttcacgcttaggtttccaaacggctgtaggttttattattgcatagccataggcatcgctttcttcggcaatcgaaagccaatcgtcttgcgtgaaggtttcaagcagaatcataagtaagatagcctcttctttgaaaatcatggcttcaaactcttctgagaatgcttcgaaagactttgaaaattcttctaaattagcatctggaagttcttttagtttagcttctgccgttctaaaaagttttcggatgtcatcgtctactccccacatcacttttggaggggagtcatggccgtaacgctccattattggaaagaaaagcttttctttacgcgtataatgattatggaattgaccaagtagagtcatctgatgcttaagtccattgaacaggtcagatttaaaatcttcattttcaggcttactaatattttctatgatacgtcggatacggagaatagctgaacgtagggctaaattctcttgtttaaacacataaacagggtggccctcttgatcagcgtctgccacttccacatctgcaatagcacctttaaagaggtttgcgtgaacattacagaggctcattacgtcttcaaaggtaaccccatcttctgatgacatcaattcatgctccatcatagagatttcgagggcagatactcccttgaagtgttgattgaagcgctcttgaacactctcaggactggctccatggtgtaaatctagtagaatttctttgagtatttgaatacgactatcttccatatcagtcaccaattacgtcataaccgttgaaaatcaaggtttgcttaattttatctaggggaatattagctaacttagagccagcttttagactagtcaccttaccgacagtatttagcatagctggattagacaagggcttgaaaccgagatcaatcagtaattccttaacctctggatgctctttaatgattgttgcaacaggttgtgataaatctatagtgttggtagtcataatgacctcctaataacatatttactacttccattatacacgagaataatgaaaaaaaaccaacaaatcttagtttgctggcttttgattaatttccaaataaagcttctgtgacattatgctggatattttcccactcctgctctgccctcaccatcttacggtggtaatcagcacgcccacgcaagtaggcagcaatttgataatcttgcttcacaattggtatctcaggaattttgatatccaagaggtcagccgtcgataaatttaggacagcctttcccttatcagcatagtctaaataggcacgaccaatctctgtctcaaggaaaaacttgatgtagaaaccacggagtttttccttaggtcgtaatactgtgatatttgatgaggcgacaacttctcgcttgccctgatcttcgaaaacagcaactttttgtacagttcccttagaagcaataagaacatctccatcttctaagagaaatcgtaaaagtttacggcgttcctcagaaaacgttttaaggtcatcgtaggcaatgccgttgggtgtcatatccgatagattaatgacagcgaattcgccaggttctgccttagcagggacagcttttcctttaaattgatcgacaacatcgcctaaacgaacaagtttgtctgtattagcttcgtaatcgataatcagttgaggtctttctttttcagacattgaatctccttttttatattttactatccatattgagtattgctatacaataatagcaagaagctaatacttttgcaagtaaaaactgtaagaaaggaaaaataaaaaagagacctgagccttattttataagcttttaaccgctgctactgctgcttcatagtttggatcagtattgatattgtccaaatattcgacataagtaatcttattgtcagcatctgccactaaaactgcacgcgctaacaagtgccactcttcaatgaggacaccataatctttaccgaaactattatcatagtagtcagaaagcatgatggcattttcaagtccttcagcaccacaccaacgagcttgtgcaaatggtaggtccactgaaatagtaataactactgtatcgtctaattctgacaattccttgttaaaggtacgtgtttgagttgaacagattccagtatcgattgatggaacgatagagataacttttttctttccatcgaattctgaaagtgattttttcgtcaaatctgttgtggtcaagttaaagtcacgcaaggtatctccaacttgaagttgtttgtcttctgctactgtaactggttttccaataaatgttggcatgttagtcctccaatactttttttactattgtactgtaaatatagcaataagcctaagcatttgtttagaatttttcaaacagtagtctaattttttcagcaataactgcattaattgcaggaataacctcatccgcaaagttttttaggtagggataatcaccaatttgcactccatatatagcatttttgaaaagagaaatatcattttgatcatttccaaaagctacaaagtctttaccaaagtgatttaaaacagtactagccttgctcacacctttaggattaatgtaaaggcacctttcgatatcatgataactaaggtctaaacattccagtttgtttagattaaagataaggtcttcacgtatatcttcatgctctacaagtggcataacaactttgataggctcattaagttcatgaacaggcaaaatccttgctttttttaatggatcaacatttgaaagaaaagggatttgctcaggattttgaatagcataattaaaggtatcatcaataaaataagggagattataagtatcacagtagctaacaatcgttcttagagcaggagaaggtattgtgtattgtgatactaagtgttcatcttgaaagacttcaccaccgtttaagccaactactgtcagctttctcaactcaccttctaaaatactaagacagtctctgtaagagcgtgctgttgcaaaaataatttcatgaccgtattttggtgcagttaaaagaaccttttgtaagtcttttgacatggtcataccatcaaaacatagggttccatccaaatcaaaaacaaatttcatagggatagtataacaaaaaaccagctaaagagctggttaaattatttagtatcgaaatacttaaattttatcaagagctagttttaaatcttcaatcaaatcatctgcgttttccaaaccaactgagagacgaatttgatttggagtgacgccacaagctagtaaatcagcttctgccaattgttggtgagttgttgttgcagggtgcaccaccaaagattttgcatcagcaacgttagctaaatctgagaagatttcaagattatcaattacggtacgtgcttcgtcttgtccacctttaacatggaaagtgaaaatagagcctggtcctttagggaagtatttttgtgccaaatcatagtaaggacttgatggtaatccaggatagttaactttttcaacttttggatgattttctaaaaagtctacgatttttttagtattttcgacgtggcgttcgacacgaagtgaaagtgtttcaagtccttgcaagagcaagaaagcattgaaaggtgccaaggcagcccctgtgtcacgcaaaagttgtgtacgaagggcagttacaaatgctgctggaccaacatcacgcgtatagctgatattgtggtaagatggatcctcgtcaaccaactgtgggaatttgcctgaagcttcccagtcaaatttaccagaatcgacgataagacctccaatagttgttccatgtccaccgataaatttagttgcagaatgaaccacgatatctactccatgggagataacattgatgagatatggagttccaaaagtattgtcagcaaccaatggaatcttatgactgtgagcaatctcagcaattttttcaaaatcaggaatattgataagcggatttcccaaagactcaatcaagacaagcttggtattatttttgatagcagcttcaatttcttcaggattgtcaacatctacaaaagttgttgtgataccatagcgtggaagagtttcttttaagagattgaatgtcccaccataaagggttgttgcggcaacaacatgatcgccagcatgtgccaaaccaaggatagcataggtgattgcagccatacctgatgctgtagccaaggcaccaacaccactttcgagggctgcaatacgttcttcaagtactgctactgttggattggtaatacgtgtgtaaatattaccaggctttctaagggcaaagagatcttcaccttcttgagcgtcgtcaaaaacatatgaagtggtttggtaaattggaacagcacgtgattttgtttccttgtcaggtgtttgtccagcgtgtaattgtaaggtttcaaatgaaaattctcgtgacatatgggtgtcctccaaaacaaaagttgacttcattctacacccagaaaagctagctgtctaatagaaattttttatcaatgtgatagggagggcttataaaaaggacctttcggtccctttctatttcttctcaataggtgctacgcttgccaaaactttttttagtccaacttctgggaattttatcttaagttcttgtgtcttgccacttccagttacttctaggacggtaccatctccccatttcttgtggtgggcgatatctccaatttcccagtcagtaactgagttaccagagtctgaagtcttgccaaaaggtagtcccccagtagcttttgaaaatggctgagcgccagtatgtctttgcggttgtgcatttgcttttctggtctgaagcgcttgttgtaaactcatgccctgaccaaattgtatcggctcttcctttgtaaaacgaacaccaaatgatgaattggctggacgtgctagaccttgatattgtaataaatcatctgaaatttcacgtaagaaacggctaggacgattatagctagtcttaccaaaaagagtacgcgtattagcgttggtaaggaaaagaatctcttctgcccgagtgatacctacgtaagccaaacgacgctcttcttcgagttcatctggctcttctgaggcacgtgacaaagggaaaactccctcttccataccaattaggaagacaactgggaattcaagccctttggcagcatggagagtcatcagggttacttctgctgcttccatatcaccatcgtccgtatcagcaattaaagctaaatcgtttaagaaacggcctaaacggtcaattcctgtctcgtcttccgtaccatcggtgtttgtttcgtcaaaattcttagtaacagacatgaattcttcgatattttcaatgcgcgcttgactttcaagtgtttgttgcatcgaaagagcatccagataaccagacttatccaaaacagcctctacagcttcagtgatacttagtccatctagctgatcacgtaggttcagaatcatgttagcaaaatcgtaaacgccctgagctgctttccccttaatcggtgataacataatattagctgaagcatctaggagactcatgttttgctcataggcaaaggtacgaatcttttctagtgtcccaggtccaactccacgtttaggttcattaacgacacgttcaaagctaatattatccgcagggttggcaatcaagttcaagtaagaaatgacatcacgaatttctttacggctatagaacttggttcctccaaccatggtataaggaatattagacttgagtaaagcttcttcaatggtacgagactgagcattagtacggtaaagtacagcgaaatccttgaagttcttaccttcttcacgaataatgttatcaatagttgaagcaacaaaaacagcttcatcacgctcgtcattagcacggtaataaacaatttgttcaccgtcatcattttgagtccaaagtttcttaggacggcggttacggttgttcttgataacttcgttggctgcttggagaattttcttggttgaacggtagttttcctccaagaggacaaccttagcttcaggatagtccttctcaaaatcaaggatgttctgcatgtcagccccacgccaaccgtagattgattggtcagcatcacccacgacacagatattcttgaagcgagatgctaagagttttaccaactgatactgagcatggttggtatcttgatattcatccacgtgaatatactgataacgctgctgataataagcgagcacatcgggatttttatcaaagagacgcagagtcatcataatcaaatcgtcgaaatccatggcttcactacgacggagctcttcctgataggctttgtaacatttagcaacgatttgagtatacatgtcaccagcttggtgctcataagccacttcatccaagaggtcattttttgcgttggaaatggttcctaaaatagcacgttcattccacttcttaggatcaagattaagattcttgagaattcgtttcatcaaagtacgttgttcaccaggatccacgatagtaaagtttcgattgtagccaatatggtccgcttcacgacgaaggattcgcacgcacatactatggaaggtcgcaatcaaggtttctgaagttgctgggtttaaagccatagcacgctcacgcatctcacgagctgccttattggtaaaggtaatggccaaaatattccaaggattaatcattttttcgtcgataaggtaggcaatgcggtgggtaagtacacgtgtcttccctgatcctgcaccagccataatcaacaaaggaccttcagtcgtttggacggcttcagcctgtttgtcattcataccagttaataatgggttcatcatattctccattctcaaaaataagctctactattttatcattttttggatgaaaatgcagactctattcataatgagtgtgaaataactttagcaaataatcgtttgtttttattgggaggttgtttgcttaaaatgattgttattccaagcttttctaggttttggtgaaaggcattcttaagtgtaatattcggttttttatagttttgatgaaaattagtgttgacactgttcggttttttcgataagatagaaccacaataaaataaaaaccgagtgatgtcatcaggaagactggtgattgacggacttctggagagatcttgaagcagccttagctgtaaacaagacaccgaaggggcaaggggtaacaaccgaaactctcaggtaaaaggacagaaagcatcgcaagtttttaacttgtagtaatagctttgtattctcagaggtctggttaagccaaacctcttttttgacgtctcggttaaaggagattgttacattcatgttagacttttttactaccattgatgattttgtctggggtccaccccttttggtccttcttgtaggaactgggatttaccttacgcttcgtcttggacttttgcaagttcttcgtcttcctaaagcttttaaacttatctttactgaagataaaggggaaggtgatatttctagttttgcagcccttgcgacagctcttgctgcaactgttggtacaggtaacattgttggggtagctacagccatcaaaactggtggacctggtgcccttttctggatgtggattgccgctttctttggtatggcaaccaaatattccgaaggtcttttggctattaaattccgtacacttgacgaccaaggtaatgtttctggtggtccaatgtattacatcacacatggtttctctagaaaatggcaaataattgctaaacctttggcctacttctttgcctttgcaggtgtgcttgttgcatggttggggattggtactttctctcaagttaactcaatcaccgcctcacttcaaaacagctttgactggtcaccaaaaatcgtaagtatcttacttgctcttataactgctgccatcatttttggtggtatccaatctatctctaaagtttctgaaaaggtcgtaccatttatggctggactttatatcctagcagctcttgtggttatctttacaaactttaatcaacttttaccggtccttgaaatggtcttccaatctgcctttactggtaaagcagccgtaggtggttttgctggtgcaacagtcatggtcgctatgcgacttggtattgcgcgtggtgtcttctcaaatgagtcaggtcttggatcagctcctatcgctgccgctgccgctaagaccgaagaaccagttgaacaaggtttgatttcgatgacaggtactttcattgatacaattattatctgtacgcttacaggtcttgctatccttgtaacgggtcaatggtctggtagcctagaaggtgccccaatgacacaagcagccttctcatctgtttttggtacatttggtgaaattgccttaacactttctttggttctctttgcctttactacaatcttgggttggtcttactacggtgaacgttgtttcgaattcattttcaaatcaacgaaattccttccactctaccgccttatctttgtggttatggttgcccttggcggatacctcacacttgatgttgtttggaaaattgcagatatcgtaaacggtttgatggcattgcctaacttgattgccctcctagtcctttcaccaatcatcattaaagaaaccaaatcatactttgaacgccacaaataaagaaaagagctcaggctcttttttcttggctttatcagcatcaatccttgcgactactgctcttttgcgttacaatgaaattaaatcattttaaaacttatacagaaaaaatccaaaggaataactatgtcaattaccaaagaatttgatacgattactgccatttcaacgcccttaggtgaaggtgctatcggtatcgttcgcttatctggaaccgatgctattgctattgctaataaggttttcaaaggaaaaaatctagaatcagttacttcacatactatcaattacggccatattgtcgaaaatgaggaaaccattgatgaagtcatggtaagtgttatgcgtgcgccaaagacctttacgcgtgaggatgtcgtggagatcaacactcacggtggggttgctgtgactaatgaaatcctccaactccttattcgttctggagctcgtatggctgagcctggagaatttaccaaacgtgcctttttgaatggtcgtgtggacttgactcaggctgaagctgttatggatttgattcgtgctaagactgataaggctatggccgttgccgtctctcaacttgatgggtcgctcaaggatctcattaacaacactcgtcaagaaatccttaacaccttggctcaagtcgaagtgaatattgattacccagaatatgatgatgttgaagaagttaccacagctcttgtccgtgaaaaaacgcaagagttccaagcacttttagaaaatcttcttgccactgctaaacgaggaaaaatcctacgagaaggcctttcaacggcaatcattggtcgtccaaatgtcggaaaatctagtcttcttaacaatctcctacgcgaggagaaagctatcgttacggatattgaaggtactacccgtgatgtcattgaagaatacgttaatatcaagggtgttccacttaagttaatcgatactgctggtattcgagacacagatgatgtggttgaaaagattggtgttgagcgttctaagaaagctctcgaagaggctgacctggttctccttgtgcttaatagctccgaaccattaacagagcaagacagtacattactagaaattagtcaaaatagcaatcgcatcattcttctaaataagacagacctaccacaagcaatccaaatggaagagcttcccgaagatgtcattccaatttcagtcctcaagaatgaaaatattgacaaaatcgaagattgcatcaatcagctcttctttgataatgctggcctagtggagaaagatgctacttatctctcaaatgcccgtcacatttcactcattgaaaaagctctcgaaagtcttgaagcagtcaatcaaggtcttgaattaggcatgcctgttgacctcttacaggttgatatgacacgcacttgggagattcttggtgaaattactggtgatgctgctccagatgaactgattactcaactatttagtcagttctgtctaggaaaataaacataactaaatttatgtaaaaagatgctttgtcatctttttttgttcataatataaatacagaaatatatttatgtaaacaatgacctatcaatatcataaaacgatttactcatgctttttaagaaagaaaatgctatcatggtactatcctatgattttgaaaggtttacgatgggtcaaacagctactgatactgattttaaacatttgatagattttgacgataacctgcttccatttcgactgacggaaaccaaggttgaaaatggacgccctgatattcttttccattggcatcctgagcttgagattcagtatgtttatgaggggacagctcgttatcacattgattatgactattttgacagtcaagctggagatatctttttaattcgtccgaatggccttcattcgattcacccagtagataatcagcctcatcatacggacaccctacattttcatttggatatgttggggcagtcgctggtggacccgcttagtctacgctacctacagcctttacagaattctaatttcaagtttaaacaatgcctgagtccgtcagacgaggggtatagggaaatcaaagctctcctctttgagatttttaagatgattcgtcagaaagatcgtcaccatgaacttcttctcaagtcaaaactagaagaattagtctacctcctctacttctatcgtttggtagagcgaaaaacttctgatgatcattatcgtaagaatgaaaagattcgggaaatcattgattacattaaccaacattatgccgaaaatctcactatagaaaagttgtcagagcttatggggtatagtaagacccactttatgacgatttttaagcaacatacaggtacatcttgcacagaatttatcattcaggcaagactcaatgctgcttgcgaggagcttcgtaatagcgttaaaccagttttggaaattgctactaatgttggttttaataacctatccaatttcaaccgccaatttaaacactattacgaccaaacaccaagccagtatcgaaagacacatagtaacaagaagaaaacaaaaaagagttaatcaaaaggttaactctttttttatctgcaaactgcttagtttttctctttacctttgtgttttccactaagtccaaagagagtgagcaacataccaagtccaaggagacctgcgtgtgagcccttgtcacctgttgtaggaagaatttcagtttgggcagaagcttctgtcactttttcagtttctttaagtgcttcgcttcttgttgaaatgaagaatactttgccattaggagtcgtcactactttagatacgactggtttgctagtttctaaatctttagcaatagttgatggagtgactggtgccaatggattaagtgtaggatctgctgcattttctttcttgttcatggctgcaaaatcagcacttgaaattgaaatggtacgtgagtttggattgataacggcatacttagaaaggtctgcacgtgtcaagtaatccgcaaagacggtatccattgaaggaccttcttcacgaggaccgcccaacattgtgaaaccatcaccaccagcagccaagaagtcgttggttacaaggtagtaagttccgtttgtgttgagtggtttataggcaccagtttctggatctaaaatgtcaattgacaagatacgtttttcagctggaagagttgtgtcatagtaaacacgagctccagagacttgaaggaaaccaccagatggttcaaggagaggttgaccactttcatccagaacagttttaccactttcgtcaacttggagaatagaaccaagagatttgacaaacatatcatggatattttgacctgttacttgaatttgagcaactgagttaccaaatggaagaacggcaatgatatcacctttagtgattggtttgtctttagcaattgtttcacgaagaccaccaccatttgtcacggcaaggttagacttgtgtgtgaaggctgattgtccgtaatctaagagagcatcagcgaccacattaccaaggttagtttcgcgaacacgaacgtccatacggtcaccgctaagtttaacagggctattttcaataacgactttcgaagaatccgccttgtacttagcttggatatcatcgatcatagctttaactgttgggttaacttgataattctttttagcttcgtcgtgtgagatcacgccatgtgacaagacacggttagaattataaacgacgcgaccaacattgttaaggtagctaccagtttggttgtaagtaacgttatcgccgtatgtcgctgtgtgaagagtgtgtgagtgaccatcaaggacaagaacacgttttcctttcagaggtgcataatttgaaagagcttctgccaaagttgatccacgccattcaactggagttgttgtatcaatacccaagtgactaaggacaacataagtcttatattccttaccttcggcacgggcatttgattccacttggtcaacaacagccttaacctcagtaattggatctgtgaaagagacaccaggaatattacgtgggtgtgtcttagtagctgtctcaggtgttgtaacgccaataacaactacttcgtcgccatcaataccaggagttttatcaacgattgtagatggttggaaaagacgtacgccatctacatatacgttagaggtgatgattgggaaattgatttgtttgctcaaacgacgcaattgatcaagaccaaagtcgaattcgtggttacccactgtcatggcatcaaaaccaacagcattcatgacgcttgccatgtcttcacctttagaactgtttgaaattggaagaccttggaatgagtccccagaatcaaagacaagggttgttccttttgaacgagaatcattgacgataccagacaaaagggcatcaccaataaccccattacgatcatcttcaaccatacgaccgtgaacatcgttagtgtgaaggactgttacagtatcgttgctggcacttgtgctagcatttgtcacgacttctgttgtaggagttgcggctacagttgcagtttcgcttgctgtagcaacgggtgtttcgcttgcttcagctgttgaagcagtaacaactgatgttgaactagctactggtgctgcagactcactagatgcagttgttgctgcagtagatgtcgcattggtagttgcctctgtagctactacttcagtgcttggcgctgtaacagctacatgagtttctacctcgtcagcttggacagcattggccaagatggcggttgagacaagtagggttgatagggtcgttgcaacgactgttttcttcttcattccaaaatacctttctgatttttaaaccgtttttattataccacatttataagattagaattaaataaatttcaacatttcattagatattcaaacaattttttcgaaaatcaataggtagctaaacgtttttctagataaccttcaagcagttcaaaagtaaagctcaaagtccagtaaataagggcgattaggatatacatagacatgtagtcatactcccgcccaccgattatcttagcattttggaaaatgtcaggcactgtaatcatagcagccaatgaggaactctttaccatgtcgataatgacattaccgagaggtgctactgctatacgcatggcctgaggtaagataatccaacggataatagacttctgcggaagaccaagagagcgagcggcttcccactgccccttgtctactgcagctatggatgaacgaaaaatctctgccatataagcggcactgacacaggagaagccaataaaggcacaaagaagggcaggtagttgaacaccaacgtaaggcagaccaaagtaaagaatgaagagcacgaccaacataggaaccccacgcatgatggaaatataaatacgtgctggatacttcaaccaaggtttttgcgacatccgcataaaggcaaggatgatggcaaatacattcccaaccataaagcttaaaagggaaatccccaacgtataaggtagacctgataggacatagggaatgctttttagaatcagtgaaaaatcaataatcataagtctatctttctaaacatttctttagcaaataagcgatccaattggatcgctcatattattcaacatcagagatatcaatttcagtgtagtcaactttcgttttctttgtaacgtcttgaccagcaaagaacttctctgaaatcttggtaagggtaccatctttcttcatgtctttgatagctttattaactttttcttgaagagttttattcttcaatgagaaagtaaagcttgttgagtaagggttactgtagataccatcgttgatcttaacagggtacttatccttgatagcggctactgccatcttttgcaaatagtaatcgttgacgataacgtctgtacgaccatttaccaagtcttgcatataaacgtcattggtaacattgtcatatacgacgagttcagcacccatttttttggcaatcttcatgtacttggtacttgcagcaccggctgctttcttgcctttgaggtccttccatgaagaaattcctgagttatccgatttacggactaccatggatgtaaatgaatacttgtatggttcagaacgcaagaattttttaacgttcttgttgtcgtcttcgagtgagtagttggcgatatctacttgaccactatttacagcagtaagcatgccatccacgcccatctccgtgaagtcaattttcaacttaagacgttttccaacttctttgagaatctcaacgtcataaccagtcaaattgttcttatcatcgtggtagctttgtgggtaaagagttccagcagtcgcaaccttgatgctcccacgtttctcaatcttttcccagttcttttcacctgtactctgtgacgagcaggcaaccaaaaagaccgcagccaaaattaggctgaatacggcgaaaaatctctatttcatctatgtgtctctccttaaaaaatgaagttaagttaaaaacttataatcttagcctacactatttgaaagggtttcacaaaatattgaactgaaaatgagaatgtctagctaaaaaccgaacattcttccatctgttgggccaagtgtaagaggaggtcctctcttcctttagcagctgttaattgaactccgagtgaaagaccttgctcatcccgatagacaggtaaagaaattgatggttgtcccgtcaggttagcttgttgcgtgaaaggtgtccagtctaggctgtccgcaaacatttcccaaataagttcctgttgctttggccagtcaaaatcagccatatgtttgagttgattttgtaagttttcagagagggtaaactgtccatgcttaggtgccacatccgcaactgttggtgttagaagaatatcgtaagtctcatgaaaattcgccatctgatggctatactgatcccactgggcaaggattttagagtaaattttagcaggaatcttttgcccagattggaagatagcccaagtcattaactccatatcttcaaagatcatcttccgtcctaaaccagcctcaatagagtcaaacatggcagccgtctcgacactattcataatgtagtaagactgcatggcttcaatcccattcaagggctgatcgctgatttcatgcacatgatgtcctagactttccaaggctctagcagccttttttgtcgccgcaatagcagattctgacaccttaccaccaataggagagacagtcgacaaagcaatcttcaaaggtctaactgcttcttctaacgacactttgctaagcttcggtagaagaaaaggactttccatctgacacgtctgcatgtgatagagcaagcgttttgtatcgcgtacagtcttagtcaaggcaaactggacagaggctccctgccatccacggaaagaacctgggccaactggaattcgtcctctggtaggcttaagcccgataagtccgttaaaggaagctggaatacggatagagcctcctccgtcactagccggtgccaagggagaaatacctgaactcacaagagcagccgccccaccacttgagccaccagcattacgcgttatatcatcaggtagattgacagaaccatgaatctgagcatcactgatatttttgaagccaaactcaggagtgctagaacgtcctaaaataatgaagcctagttcctcaagctttttgacatagttatctgtttccttagctcgataacttgtaaataggcgagaacccgcggttgacggctcaccagcttgctcctgccctaaatcctttagaaaaatcgggactccagcaaaaggtttctctgaaaagtctctagtttctgcttcttctaaagctttctgatagcgttggctaacgatagcattgatgttaggattcgtcctctctgcttcacgaatggtagcctccactagttctcggggactgaccgtcttattttgcacggcttgagccattgccgttgcatctgaccactcattaattgtcatcttatactctccctgcttatcttttcctaaattatactaaaaaaagcgaaacgcctaaaacgtaccgccttaaatcttgataattagtcttgccaagtttcttgattttctttaaatttcttcaaaagttgaagtccgtctgctgtgatgtagccttgaactttagcgactttgatcaactcagtgtagtttgaaagagtgaccaatttcacgccagcatccgcgaagtttttctcagcttttggcaattcgtaagtgaagatagccacaacaccgataacatcagccccttcacgctctgcagctgctacagcatcaagtactgaaccaccagttgaaatcaagtcttcaacaacaaccattttttcgcctttaaccacacgaccttcgatttggttaccagcaccgtgatcttttggtttgctacggatgtaggcaaatggaaggttcattttgtcagcgataatcgcaccatgaggaataccagcagttgcagtacctgcaattacttctacttcagggaattcttccttaatcttttccacaaaaccattttcaataagtgtacgagtttctgggtaagacaaagtaatacggttgtctgtgtagattggtgatttgattcctgatgcccatgtaaatggttcttcaggtttaaggtaaacagccttgatatcgagcaagtcagatgcgatttgtgttgctaatgtcataattattatcctccgtaaagcgttttctactctttattataacctaattcaatctattttcctatgaaataaggtcattttgaaaatttattgaccgttccattgggccttgatgtcatgataagctgctactggatcatcagcttgtgtaattggacgaccaacaacaatgtaatctgaaccaatttgacgggcatcggcaggtgtcatgacacgtttttggtcgccaactgctgctcctgctggacggataccaggtgtcaaacaaacgaaatcttcatttgttgcttctttgattttcgctacttcgtgtgctgagcagacaacaccatcaagacctgcttcagcagtcttcttagcataatgaaccactgattcttgaagtgtggtttggatattttggaagtcacgcatctgctcttcagaggtagaggtcaactgtgttacagcaatcaagattggaccatctcccaagccctcacgcgcagccttcatcatttccacaccaccagccgcatgcacattagtcatatcaacgccaaggttagacaagacacgcatagctgatttcacagtatttggaatatcgtgaagcttaaggtcaaggaaaacactatgaccaagctctttaacgtagcgcacaatctcaggcccagccgcatagtaaagttccataccaatcttcacatagagcttttcatcagcaggaaacttagcaaggaaagccttcacttcctcaaaagacgggaaatcaagggcaataacaggacgattttctctcatttcttatatcctttcacacaaaaaacctccgccagtcagcgaaggttgcacgaaaatagggcagtccctaccctttagtgatgtcgtagcatctcagtacacctttctcgcctctctggactcgattaaaggttcagttcaattttttttattatagcgcttttataagggaatgtcaaagggggatgaaagtaattatacctttgctgaactccttaaaaatgctatttttattctatttccccaacaagtctgttctaacttctttgcgcaagtcttcgagtgttgtgatgctgtacttgtccatgacctcagggagacggtcaatgattttagggcaggcatatggatctgcgaagttggctgttccgacaccgatggctgaggcaccagcgataaacatttcgatggcagcttcggcactgtcgacgccccccataccgatgattggaaggtctgatgctagagcaacttggcggatgagtttaagggctactgggaagacagctggccctgacataccaccttgaccgttggcaataattggtttgcgtgtcgccaaatcataacgtgtaccaaccaaggtgttaatcatggtaaagcctgtcgcaccggcatcttcgactgccttggcgacacttgtgatgtcagccacgcttggtgtcagtttgacatagacgggcacatcagagtgagaaacactggcttttacggctgcataggcaagctctgggacttgtccgatgagaaggccattattgccatggtccacgtttggacaggaaatgttaagctcgattgccttgacgttacttgccttggaaatcttgtgagagacttccgcatattcttcgttagaaaatccagccacattggcaatgattggaagctcaggataatgctcctgtaaccaagggagtttttcagacaagacagtatcaacaccagggttttgcaagccaatggcattaagcattcctgatggtgtctcggccactcgtggtgttggattcccaaaacgagggttggcagtcgttgccttaatcataattgaccctagtttatccaaatcataatacttggcatactcttgaccaaaaccaaagcaacctgaggctgggataataggatttttcaagtcgagccctggaaggctaatagctaaacgattttctgatttaatctctgacatggtaacctcctagacgatgacttttccggtagggaagactggtccttcttcgcaaacacgaagatttttggcgtccgactctcctttaacgtgaaccacacaggcatagcaagcacccataccacaagccatacgagcttccatagaaacataggcatgaggatggttttcaaacttgctatcgacatattttagcatgcctggagccccgcaactgtaaacggcatctggtgtccagtcgaaaccatcaataactgtcgaaacgtaacccttgataccgtatgaaccgtcatcagtcgtcacatagacatcaccacaagttttgagcttgtcctccaagatgacagcatccttattggcaaaaccaatgactgatacaacttccactcccttagccttcaactgcttagccgtctcaaccaaaggtggcacaccgatacctccaccaacgagaagggctttctgcccagcctcaataacggaaatatcaaagccatttccctgaggacccatggtatcaatagtttgaccggctaccatcttagaaaggatagctgttccctcgcgttccactcgatagacaatggttgcctctttcttgtcatagtcaatctctgaaatggaaattggacgacgaaggagcttgcttgggtctggtaccttgaggtggacaaactgaccaaccttcatatctgcaaccatctctcccttaagcaccatttcgaaaatacgaggtgcaatctcacgctgactcacaatggttaaatcttcaactaatatcatgacaaccctttctaaactgcaaaatgtcatcaaaaaaacctcgccacatggcaaggtcgcacaaaaaatcacaggagaaccctgttttttcacctgtccgacctttcaagcctctctggactcatttaaaggttattttgtgattattataaccgttttcaagacggatgtcaaaggagaaaagaaaaaaccaaagcttaaaaaactaagctaaggtctctccagcctataactaggccctctgtttgatacgttctcaatcatctcatagggtaacataaattgtcaatattcctaacaataggtgttaagaatattggataacagtcttaaaataagattattggaacaatctgtcgtaaaccatagtatgagccaactgttgaccatcgccacccaacaaatcaaccaaggcgtaggcaaaggctagggctgttccggcaccacggctagtgacaatattgccatcaacaaccaccaagtcagtttgatgctcgccagatgcaatttggtcctcaacacctgggaaacatgtgaatttacgcccttcgagcaagccagcacgttcgagaacaattggtgctgcacaaatggcagcaacatattttccagcttttgcagcctcttgaagagaggcaatcaaggcttggttgtcgcgtagattagttgagccaggcatacctccaggaaggaccaccaagtcgtaatccgcaaaattggcatcaaatacgccatccatggcaacttgaatcccatgtgagccagttacagacgcactttcaagtccaagcatgtcacagtcaaatcctgctcggcggaaaacatctactgggctcaaggcctcgatttcttcaaatccttccgcaaatactactgctacttttgtcatgatatacctccaattgacttatcacaagattctattacgccttaaattatagcagttttagaagcaggaaacaaaccataaaaatggctcttgtgcacgaaaaaaagacagcacctggactgtccttgtcattttatctaattaaacttgctagaatccacaagagataaatatgggctgggtagaaaatatagaagaaattcttgttaccactaccacgctcaccattatagaaatacataggaattgccgcaaagatcatcatccactgaacacctgtcggatcaaagagatgggcaatcactgaaataacagctaagataatgatttgagccatgcgattggtacggaaaatatagaatagcaaaccaagtataaccatcacaaagccaccctcaaccatgataatacttggcacaagtgacaagataaaggcaacaatctgcacaacgattgggtttgcatgtggcgtttcaaatatgcctgcaagtatcacaactggaatagacgaaagaatcggcaagagaaagacaccaatcccttgaatcaactccttgttcgatttatcgcgaagtcccttagccaacaaatcccaagagcaaataaaaatcccagtgataaagaaggttgaaaaggcattgttggttaaaccgatactaccattatgaaaaatactaccaatgatggcattgccaataatcataaaccaactcatgtaaagcagacgcctgagaaaagccatacgatcatgagtgtagtgaaaactatcagcagcaagaaagaggaaaattgggaaagacagacgtcccaacatcgtcaaccatataggtgcccccatactcccgaacatctgatagatttggtccaaaaacataagtgcaacagctaggtatttcaaattagtcgcattgcatatctttttaatatcgttcatttaatgctcctttaattttcagcatattaaatgataccacaagtcagatgtaaattcaaaggtattcatggaaataaaagacaaaactttttaactattttagcggaacaatttttgtaataaagaatggttcataataataacaaactcaattccgactacccatccaaagcatttttactctctttgtgctataatagttaggcaatatttacgttcataacgtatgcaaattatttaaaaaaactaacaaagcccataaactctgcaagtttttgaaatatctttttttgcgagcagagcgagcaattaaccgagactttccgccgtgttaaaagcgcctgaaactaaaaggtttcaggcgctcggaatttttgagacgttaggctcaaaaattagtcatggaactttgtaaaagttcgctgacgtccgccaacacctaaggaaagtctcacagaaaattttatttttaaaataaaacaattattatcactaacaagaaaggaagtacatcatgtcttttgacggcttttttcttcatcatatgacgactgagttgcgtgagcaagtgctctacgggcgtatccaaaaggttaatcagccttttgagcgtgagttggtcctgaccattcgtaacaatcgtcagaattacaagcttctgctttcagctcaccctgtttttggacgtattcagacaaccaaggctgacttgccaaatccacagaatccaaatacctataccatgattatgcggaaataccttcagggagcggttatcgaggatatccagcaagtggaaaatgaccgtgtccttgagatttccgtctctaacaaaaacgaaatcggtgacagcgttaaggttactcttgttatggaaatcatggggaaacactccaacattatcctgattgacaagaacgagagcaaaatcattgagtctatcaagcatgttggtttctcacaaaatagttaccgtactattctgcctggatctacctatattgctcctcctaagacagacgctaagaatccttttgatattccagacgaaaaactctttgagatcctacagactgaagatttgtcagctagaaaccttcaaaaacttttccaaggtttggggcgtgacacggccaatgaattatcaaccttacttgagactgataaactcaagaatttccgtgccttcttcaatcgtaaagtaaagccaaacttaacgactaaggcattttcagctgtaagattctcagatagtcaggaccaacctgagtttgaaaccctgtcagccctattggattactactacttggacaaggcggcgcgggaccgtgtggctcaacaggctagtgatctgatccatcgtgtgcaaaacgaattggaaaaaaacaagaaaaagcttgttaaacaggaaaaagagcttgcggcgactgaaaatgccgaggaattccgtcaaaaaggtgaacttttgaccacttacctcagcatggtaccaaatgacaaggatagtgtcgaactagacaactactacactggtgaaaagattacgattcctctaaatgttgctctaacgcctaaccaaaatgctcagcgttacttcaagaaataccagaagctcaaggaggctgttaagcacttgactggtttgattgaggtaaccaagcagactattgattatttggagagtgttgaattcagtctttctcaagccaacatggatgaaatcgaggatattcgtgaggagcttgttcaggctggctttatgaagcgtcgttcaactgacaagcgccacaaacgtaagaaacctgaacagtatctggcttctgatggtaagaccattatcatggttggtcgtaacaacctgcaaaatgaggagttgaccttcaagatggctaaaaaaggtgagctctggttccacgccaaggatattccagggagtcacgtggttatcaaggacaatcttaacccaactgatgaggtcaagactgatgcggctgaattggcagcctactactctaaggcccgtctgtcaaacttggttcaagtcgatatgattgatgttaagaaactcaacaaaccaacagccggtaaacctggatttgtaacttatacgggacaaaagaccttacgtgtcacaccgactgaagaaaaaattgatagtatgcggatgaagtaatctgctttataaaatcaaactctcttgttttagaaacgagagagtttttctatgtcttcattagagcaatttctttcgttgatgaatgggattttcttctagttttcattacatttttccgacgactgtgctaaactataagggtaattacctatattaaaggagactttcagcatgaaggctcttatgtcatatacgagttcttttttagaatggttagggcgctatgttgggctcttagtctttgggctattatttgtgacggctttgctcattcgcaccaccatgatgacaggatattttgagtgggcggagattagtagcgttccttggtatgtttatgtttcaggtggggtcgttctgcttctgacccttctctggcccaaaattttaaaggaactgacaacaaagcagattttcatctttttttccgtttgctttgtgagttttggcctacttttgatttttctgactagttttgctggtcgagacgatgcaggtactgtctttaaaggggcggtccagttcaatgctggcgacttctccttaataaaaccaggagcctacttcttccgctatccgcatcagttgggattgctcagttttgaacgcttggttctctatctgattcctttaccagttatctctgttttctatgtattgaatcttggcatggtcattggtatgaactatgctacttggaaaatcacggatgaactgtttacgaggcttttagttagtcgtttggctgtcatcatgagctttggtttcttacccttagtctttaacatcatgtttgcctatggacttatgtatggcttgttcttttctagttttgccattctcttctttctacgttacttaaggcgtggtagggctaggaatgcgattctttcggtggtcatgctatcattggcttactgggtaaggagcaataacatcattctcattattgcgctatctggtattctaatactcttaacacttagagagaaacgttaccgctatttgcttttggttttggctttctttgcctttcctatgagcttgcataaggcgacgaccagttactatgagattaccacccatcaaaaaattcctggaacgcctcagattgcttggctggctatgggcttacaggacgaacctgattctaaacgcatgccaggatggtacactggctatgtccgtgacatttacgccaagaaaaaggggaatatcgaaaagattgaaaaaagtgctaatcatctttttgataagcgtgttcaatatctcctagcccatcctgatgaagccagttggtttttcagcaccaagtttatcagctcttggacagaggggagtttccagtccatctggaatggcccaagtaaagacaagtttcagccactgtggaataggtttgcgacttccatctatcacgatgggaccctacatctcttttttgtgacctatatgcaaggctatctcctagtcctctatcttggtggtgttttctactatgctttcacttataaacgaatgggagacggtgcaaccataggactttatgcctttctctacctctttggtggcatcctctttcaccttatttcagagactaaaagccagtacaccctaccttatatttacttacagattccaatgattgcggcgggctacaaccatatgacacaaatacttagccgctatctaaaaaataggcgaaagtcatcctaggatggctttttgtcattgtttcacaattacaatcttgctataataagtctatgaaaaattcgtcagttgatcttttacgaggccctattttgcggtctcttttaatctttgccctaccaattctgatatccaatattttccagcaactctacaatactgcggatgtcatgattgtgggacgctttctaggtccagatgccttggctgctgtaggagcttcttctgctatttttgatttggttatcggatttgccttaggtgttggaaatggtatgggagttgttatcgcacgttactatggtgcacaagactataggaaactacgtcagtctgtggcggccacagttgtcatcggtctgggcttaagtgccttggttatgattctaggacatttcgggctctatcctttgctacgatttttagggacacctgcttctatcattgggcagtcctaccagtatatttctatgattgtctcctgtgttggggtaactttgggttataatctgtgtgctggtctcctcagagcagttggtgatagtctgacagccctctattttctgattttttcagctctggtcaatatcattttagaccttttctttattacacaactccatcttggggttcaatcagcaggcttggcaacgattatttctcaaggactttcggcaattctctgtctttactatattaagaaaaaagtgaccttccttctaccaagtaagtcaaattttgttcttgattcaagtctctatttggacctttttggacaaggcatggccatgggactcatgaattccattgtttctattgggactgtaaccttacagtatgccattaacggctttggtcctctcatcattagcgctcaagtggcggcaagacggattatgtcctttgctgttctccctttgacttcacttgctgctggggtgaccaccttcacctcacaaaacttcggggccaaacagtttaaacgcatagtggctggtttaaaacaatcttgtcttgtttctatcacttggtctgtcattgcttgtgtccttctctatatagcaactccctttttggctggttttatctctggttctgataatgctgtgattattgacaacgccagtcgctacctccgtatcagttctctcttttatcctattttaggaatgcttttcatttttagaaatagtctccaaggcctaggtaaaaaactcacacctttaacctctagtttcattgagctttttggaaaaattctctttgttcttttggttattccttctatgggctaccttggtgttatcctatgcgagcccttgatttggattcccatgaccattcagctctattttgccttgaggaaacatattcgacgcttgtttatcagttagactacttttgaacatagaaaaaacgaccatcacggtcgtttttagtttaatttaatccccattcatcagagatctgtttcattatggcctcttgggagacaatcccaaagcccagcatgtaggttgagtaatcagcataaattaccttgttattttgaactgcctttaagctactccagacagggttatttttaagtttgttttctaggagctcttgagaatctgcttgaacaatcaggaggtccggattaatgtcttttagtttatctggatcgataacttggaacatatcatctggattgaaggtttcagcacgattgaaatgataagtatcatacagataaccaaaatgcccgtaagcataataacggatgtcattgtcagtcacgcgcagatacatgagtttttgattgccaaacttagctttgacattctctgcgaaaacggcctccctagcatccaatctatcgaggtccttcttcatctcatcacgtttatcaaagatttctgccaccttgagagaggtttcatgatagtcccaattttcatcggtgttgatttggtagccaacagtcggtgcaatctcagacagctcctcgtagaggtcttcctgctcgcctgtcataaggattaaatcaggttttaactcagcaatcttatccaaatctggattaccctgccaaccaactgaaaccactttggcatccttgtattgtttcttaaagagggttgaaagttcttgactatcagcttgaccagttgtcgctcctactggagtaatatccagaggatctaagatttcgccatagaggttgtcgaggataacgatacgttttggagcttttttcaactctgtcgtaccaaaatcatggacaatcgttttctccttaaaagtctgacttgttttatttgactctgcattatgtccagacgtcatgtctggcaagtaatacagtaaaagaccagaaataatggccagaatagctaataaataaagaagatttatttttttcatggcaactcctcgataagatcggattaaatcgttactttaaagttatcttaaaacttctttaatgtcaatcacttactgattcgttcaagcctatatttttgattatattgttttgatacttcaaacaatcctagattaggatgcttaagccctaataacaaccttttagttatctgaactgtgttataatgataggtaacattggagggaaattatgttagatcagctttcatttaaaggacaatggcgacagtatcaacaacgtattcttgataaatcagaaagttttatgggtgatggaaagattcacttggtcgctgctcctggctctggaaaaacgaccttaggaattgaattcatacggcgttttggtaatccaactttaattctagttccgacagttactatccgccaacaatgggtggaccggatcaaacaagcttttttaagtgatgctaaccaagcagaacaactcatttcacaagacttaaagaggcctaaaatgattacggttgcgacttatcaggcattacatagtgccatgaaccaagttgttggtgatggtcttatcgaagacacagatgatacagctcaacaagagcattttaattttcaagatttcgatatccgaaaaacatttgaggataaagatttagggactctttgtttggatgagtgccatcatttaagaaatgaatggtggaagagtttggagagttttcgtaaagcttttccaaaaatcaagatgatttctttaactgcgacacccccatacgagggagaacccgcactttgggagcgttatatcagcatgtgtggtgagattgatgaagaaattacagtgcctgaactggttaaggaagggacgctctgtcctcaccaggactatgtctacttcgcctttccaactaaggaagaacgaacacaattagatcagtttgaaaagcagaaacttaactttctaactaaactgtctacagatataaacttctcaaacaccattcagtctagtccggcactaagtaaccaaattagcgatgatgacctattggctaatcctaaatatctttctgctatcctgatttttttacggtctaaagaattaccttttcctcaacgttttcaagaacttctcgctacaaaaaccttaccaacttttacgcttgagtggtttgaaaccttgcttaatggcattatttttcaggttccaaattggtttggatttaccgaggaggcctttaaccaactgaaaagtgatttgaaagcaaatggtcttatcgaaagaaatcaagttaaacttatccggaataagaaacaagatgtcctgctcaatcaatcattgggaaaactcaatgctgttagagatatttttaaggcagagtaccagtctctaggaaataatctacgtcaacttgttttgacagactttatacgtaaggatcttcaagttcatttaggtgatgaaaatgctcaatttacccaactaggtgtcctctcttactttgaatctattcgtagagaaatgattgaacagtcttggacagtacctgtagctgtattgacaggaagtttagtgattattccaacttcagctaaagaacatctagagcgactcattcctaattctcgtttatcctatgatgttattggacagttgagccaagaggactatcttaaggtcagtatttctggttcctatcatgatttggttacagctcttactcagcttttccaagatggatatatcaaagtgattattgggacaaagtctttattgggcgaaggttgggatgccccctgtgtaaactccctcattttagctagttttgttggaagcttcatgctaagtaatcagatgcgaggacgtgccatccgtgtttggcctgacaatcctgataaaacgagtaatatcttgcatttggtttctattaatttatcacctaggaaatggtttgaatttcaagatgatgaagaaaaatacgatgagacattagagctgcagttgtatgcacttagtcctgacttagatttgttagatcggcgtatgacacagtttctgggtctccattatcaagagcccactatcgaatctggcattgatcgccttgacctcaatcaaataacttttagccaaaagggtctagaaaaacttaatcaaaatgccattactctgtctcaaaaacgtcaggagcttaaagaccggtggcaagaagctctacctcttaacgaagaaatggaagttgctaatgaagttgaagtcgacaaacaatttttaccgttagcataccttaatgattggatgaaggccttacttatttctcaagcctttgctgccacttattttattattgatttggggagatatctaattgttgggaagccgtttgttcatagtctaccgatacttctacttgcccttcttctactggctgtcttctggggaagatattttatctacaggagtccttataaacggtcggaaacatttggtaaagctatccaccaagcccttcttgattcaggtcagattgagactgaagagtctgctcctagagtggtaaaagatagtaaacaggcgatttataacgctatctatctcaagggtgctagcatgagggagaaagaaatctttgctcaggctttgactgagtttttcgctcctatcgaaaatcaacgctatatcttaaagtcttgtcacaaggtgaaagatcaaaccgaattttttgccgttccaagtatgtttgaaaagcgtaaggcagatgcagagtctttcctccgacacatccaaaaaagtgtaggaaaatataacctcatttatacgcgaagtgttcaaggtcgtcctattcttctggaagctcgtatcaaagcgcttggaaataagcaagaacgtaccgttacacataaaaaagttatgtcaactttagaatgataaatagacctaaccacttaaaccgtttttatcatgttataataaaccaacgacactatattggagaattttatgacactcacacacatttttttcgaccttgatggtactctcgttgatagttctgagggaatccacaatggttttgttcaaacctttgaaagactaggcctccctgttcctagtgacaagaaaattcgcacctttatgggaccacctctcgaggtaacctttaaagaagagattagcgaagaaggtgctgaccaagctgtcaaaatttatcgtgactattatgagactaaaggacaattggaggctcacctctatgatggtataaaagaggttctcgagtaccttagtcaagatcctaacaagaaaatctatatcacgacttccaaaaatgagcctactgctctagaaatgtgcgagtaccttggcatcactgagttttttgacggcatctatggggccacacctgctgctttccacaaggctgacgtcttgcagcgtgctattgctgaaaataatgcgaataaggaccagtctgtcattgttggcgacaccaagtatgacatgattggcggaaaaacagttggtatcaagaccttggctgttacctggggatttgggacaaacgaaaccctcttggcagaaaatcctgattttgtagctgatactgtccaagaactctgggatattttgaataataattgatattaaaaaagagcataaccatacaagcatgctctttttgtcgctggtcaacagggacaatctcctgttgagttttttaattccctcaccatcgcttatcaaactaaatccctaatcggtcggttatgttaagatagaagtagctcatagtttttcctcggattctgtttgtgtggttacttacagtttacaccaatgaaacgctatgagttttttattgcacttatattgtatattcaagagataaaaaatcaccaacatacaatgtatgactacctcattacatataaaggataagacaaaggtggtaaaatgaaagcgtaattttatggtgatgtacgatttttgtgtaaaacattctacagtacaatgagaatattttggaaaatttgaactcaacaagtctgattttgtgttcgaaaggtggctattgttttttaatgtatagagtaacagtcattatgcaccatactcaatcacaattgtatcaaggtattgagagattttaaaagattttctttttttttacaagaaatcttgtgcaaaaaagacagatttctcaaaattttgaatctgtctttctttacttaatatactgttcgtgtatggacccgcccgtttggagcttcaaattcgtattctaagtaatcctgataggtccctggtgcaatcactccacgcacatctaatacagccgttcccgcctgtcccacaatggaatctgctaacaggcagcaattcgtagacagaacaaagtaagatttaaaacgcgaagaagtaaatttatatagctcagcccctaaatcatatttcaatttgtaagcgtaggtcggctgaccgtcttccagtaacctactaggtggatcccaaggttctaacaactgatcaatttcagctagacgcttctctactgcctgattctcttcttcggtaagggataggctgtagccaaacagcgtcttttgactctcttttttacatagttcgatgtatggttccttatccactttaaacagtacgccatccccaatcgtcccaaatagacgctctgaaaagggatcgtaacttccgtaagaaatgaccttcccctgataacaaatatctacatgcccaatcgctccaaataagttgctgtcagaagtatgaaccaaaatttctaattcccttgcctcttcttcttttttcaccaatcgataagggcctgtgtgtcccgccgagctccctttttgaagaaactggttaaaccgttttaactccttagcagggataaaggctgcaaagataaccggtaggctaatacgaaagcgacgttttaactcttggccttgttggtctttgtcaaataaaataccatctcgaatattagaaatccccaacaagaccagataagcccccaagaggataaattggaagtgcccatctgaaccaggttccaagacagttgctagaccaatcccaccgtttaaaagcgcatcccataaatagagccagcctccttttacccgattggccttataaagccaaaatgtgatcccatagacaatggcactccccaactgatatgcccctaaacaaatcacaactaagtttacgggcagactactcagtcgattcaaccagatcaacgcaagtgaaagaaaaataaaccaaatagagtggctataggaaatagacttgctacgtaacaaaaagcgaagaagaaagcttcctagtccatcaactaaaaagtaaatggctaatagatccaaggaaaattttgtgaaaccaacaccgtttcgaaaaatgaggatcccaaaaatgacggcaagaaccccaaacaataaagtccgtcttcttgcaacttcttcaacagataattttctcaccatgacaccctccttcagagatcaaaggtctttagacaaatactattttatcaagtataacagcagaaatcatctactagaatttttctcattagtcaatcacaatcatagatttaatagacttgcgttcatccatatctttataggcttgattaatatcttccaatttataacttgtcgtaaaaactcggcctggattgatatctccatccaatacagccttgagcaagagttgtttgttgtaggtagtaacagaggctggtccgccaccaatcgttgtattttgtccaaaggttgatccaatggcacgattttcataatgtggaacaccaacaaatcccatacgccccccattgtgaaggactccaagagcttggtccaccgctgcttcagtaccgacacattcgagagctgcatccgctcctccccctagaatttcacggactttggcaatgccttcctcaccacgttcagcaacaactgctgtcgcacctgactccaaagccatttgttggcggtcttcgtgacgactcataaggatgatttgtgaggcaccacgcatcttagctgcgatgacagcacattgaccgacagcaccatctccaataacgaccaccttgtcacccttttgcacattagcaacacgtgccgcatggtaacccgtcggcatgacatcagctagtgtcaaaagtgacttgagcatgccttcactataatctgaaggttgcccaggaattttgacaagggcccaattggcaaagtggaatcgaatatactcagcctgaacgccaccagaccagttattacctgggtggttgtcacatgacccatcaaagcccacacgacaggcatcacactgtccacaaccgtgtgtgaaaggggcaatgacaaagtcaccagctttcaccgtagtaacgtcatcaccaacttcttcgacaattccgatagcctcatgaccgctatttctgtgtccttcttccatttccggattgcggtaactccaaaggtccgatccacaaacgcaagtacggacaatacggataatggcatcatctgctgcctctagttgtgggcgatcaatttctgtcagaccaacttgtccagctttggtataaactgctgatttcatatcataacctctattctttcgtttctgatagtatacactttttaacaagaaatcgctcacatcaaacactccctattacggtcatatttagttacttaatcatatttttttccatacttcttttctagcattttcttgacaagataaggcattttgacattttcgcggcctttcttggcaattaacttcttcacaaaatctggcatttggatatcattctcttcttccaaaatctgacttgtacttgatggagcttccaactcatcaaaggtctccagctgaggttgatagtcactatagtcaccgtctatatgagactgaattgtcgaaagaagtgccttgattaaacgaggatcgctatttggcataggaggtctgtgataggctacacctagctcttggcaaagctctttacattccacatcattgtcaaaaagaacctcaatatgctcactaataaaagcaataggaacaaaaatatagtggtcagggtggtcactctcatctcgcagatattctaaaacatcaggcttaatccaaggaatacctatatcactctcactctgccaagtattggtgtactgctcttccctaagtcctaaattctccgcaatcaatcggctattgtcataaatctggtcgatataggggtcaccaaaatctagtgccaaaactgggacactgtgggctgaaaaaatcaccttatagctatcgtctccaatctgatctaaaatctttcggatttcatcagcccaatagtgaagtagagaaggttcgcggtaccagtccttgataatttggaacttaatttgatcactttctaaaaatttttcatagcccatgactgaatagtatgaataatggggctctagaatcaaacacaaacactcttcaattccgtcattctccatctctttaatcgcatcaatgatgaaaggtcgggaaaatttatttgcaaagttaaccgacacttgttctccaagagcggaagcaaccaagtcaacttctttttttgttatcctttggagcggcgttccaccgattcgtaggtaatggtcatataaggtctgaatttcatgtggttcgggacgaactccacgtcgtatatttgtgaaaaattctgctactccttcataggtaatctcttctggggacccaaaagtcatcatcaatacagctcttttactcataattactccttgttccacgttagttctattttatcatgaaaaggcttactttagttaacttagtatcaaaaaaactcctagagacaaactctaagagtttaaataacgtttcttaatgatgatgaccatttccttgattttgacccacttccaactcctcaatattacgtttatgggctcggtgggtggctaggtcttcatcaacctcaatggtaacgttttgaaaaccacaatctttgagcaaggtacgaatcgcttctttacaattctccatgtggttgacatgctctagacaaacatggacgatggcgtttttttccaggccatccatggtccaaagattaagctgattgatactagccacatagtccaactgctccaaatcactcttaacctgctggatatccactccttctggcacggcatctaggaaaatcctgagcgtactccaaaaacgtggaatggcttttgacagaataaagaaggaaatagcaagagataagagcggatccagaatataccagtcggtaaatcggaggacaatagccattagaatgacagccacccaacccagagtatcttccagaaaatgcaggctaagaatagattcattcttggtttgccctttgcgaatgacaagacttgccaatacattaatgctgactgcaatgattccaagccagagaatgccctcatcgttgacaggttgtggatgaaagagtttcgttatattttccaaaataactaaaacggaccctgtcatgagaatcactgccgttaccatggcccccaaaaggctaaagcgcttgtagcccaaggtatagtggctatcttcttcacgatttgaaatgctctccaaaaaggcagaaatcccaatagcaatcgcatctcccaaatcatggacggaatcagccaggactgcgctggatccaaaaatccctcctgcaataaactcaacaatggcatagcctaaattcaagaaaaaagccagccagaccgcatgttttgtcttcataatcctaaatcctctgatataatagatttatgaacatcttgttcattatctattatccactactatcaacagaaaggataggggcaaaccgtttagggtgtacgttactgaacagtttgttcaaagtgtccatatgaccgctcaggatcgtcgtattactaagactcgaaaagccatctataatgcttttttacaattactcaaccaaaaagactacgaggccatcaccgttcaggaaatcattgaccttgctgatgtggggcgctcaaccttttacagccattacgagagtaaggagttactactggatgaactctgccaaaagctctttcatcatctctttgagcatgctgaacacctctctccacaagactacctggcccatatctttcagcatttcaagaaaaatcaagaccatgtaaccagtctcttgctctctaaaaacgattattttatccggcagctacaaaaagaacttgaacacgatgtctacccaatggtagccgacgaactaatccatgctcatccaaccatccctcactcttacctcaagcacctggtcgtcagtcacttcattgaaactctcagttggtggttaaaaaaaggtaaatcttacacagaacaagaagtcgttcagttttatttggagattctgaaagtagggtcgaactagaaaggggtgttttcaatgtccagcgtgcaattttactttctctttccagcgctctttatgcttcatgaactggaagaaatcgtttggatgccatcctttatcaaaaaaatatcaatccagtatccaaacaatcgaatcctatcttattacactccttttgctttcaatgccattgtcttggagcaatttctgatcctaatgacgtcgctatatcttagttcccagtttaacaactatagcatttacgcaagcatcataatcgcttatatctaccatgtcttaggacatttgattcagacagttgttattcgaaaatatgtgcctgggttgttaacgggcattttaacaagtttgtttgctctttgcaatctcaaaaatgaatttccaattaaactttatagttactctctttttaccttattggttattattttaaatcttgtagtatcatttatgattcttcataaaatcagtcataaaaaatagtactcaggcaatcatatcttagaaaggaaaccctatgttcttccacattcttctcggcttttttacagccttctttgcccttgcttttgctcttcttcacttattggcttcactttctgaagttaaaaaagggaatcacactctaggaaatacatttctcctcatcggaagtagccttgcgaccttatctctcatcctctacttctttttaccgattgtcgctctagtcctttggctgatcggctgtgatttgatttgctacggggcctattggaatgggaaacacaaaggaaacttccacccagtccaccacctgattcgggtgggcatcgctctggtccttaccatcttgttagccttgttataagaaaagctcaagttttcagaaaaaacttgagctcttttattattctatacatcatccaaaatgctataccttttacagtttatatcctttttaactcccctattttctattttttaaaagtgaggactgttttttcttgctaggaacgaatcaaaactgcatttttcaaaaaagcgattacctttcgaatgtgactagcattggtgccaaggctagttgctagtgctttagaacgcaatgactccttgctcttactaatcatcattaggatatgtaaagcaagacttccttacttcactttttttaaatgatcaggccatgtgacttgttgtcaaactctaaaatgggaatcgtgtgttgctaaatcataaatcacctcttgtaaatttgtactattgtaccaaaagctgacgaagtatcaaggcgttgtctttagcaatccagaaaacttctcttccatgcatataagaaatcgttgcactgctggagaaattggcctctaccttccatttctttttcataatactatttttacttttttattcattatacaagtaagactgaagaaaatgcaattaaaatccttaaaaagtctttgtaaactgcaataaaaggctctataatttctgtagtgggtaaaaccaccataggaattatggagcctattttgttgtagaaaaaaagtcccataagacctataatgaaaagtgaccaaaccatcattagaaagaatcttatggaacaattaaattttatcacaaacttactcgtaattaaagacaagaacatcaagatttttgattattttgatgctggaacacataaagaagtcatcgataagctagatgattatcctgcacctatgtgccctcgctgcttaggacaaatggctaaatatgacttccaaaaagaatctaaaatcccctacctagagtgtgcaggctataagatactcattcgattaagaaaacgtcgtttccgttgtaaagtctgcgggaaaatggctgtctcagagacttccttagtcaaaaagaatcaccaaatcgcgaccatcgtcaaccagaaaatcactcaaagattaatcgagaaagtccctatgacggctatcgcagacagtctatctgtctctacttcgacagtcattcgtaactggaaactcattcaacaggatagtagtaaactcagcgatagacgtttttatcgcccgacttttcgctcacacttgaccaataaagagattttagaaaagctgctttcatactctcaagaacttagaaagcactatgacctcttacaggcagatacctatatcatggcggtgattaataactaacatttggatactctaacagagctgagtgagttggagaggaagggctgctttcttccccaatgattaatgaatcaatataagtatttttaagagggatttaaggaaaaatttaacttttacttaagccttttttattttaggatattatactagagccatcaaataaagaaaaactctaaggagaatcctatgaaattcaatcaaaatcaaagatatactcgttggtctattcgccgtctcagtgtcggtgttgcctcagttgttgtggctagtggcttctttgtcctagttgggcaaccaagttctgcaagtgccgatgtcgtcaatccgacccctgctcaagtcgtaccagacgctgcttcggtgagtgaaaagagcgacttaccagctgaacttctcaaagaagcagtcgatacagctcttccttcagaacaggtaaactcagcacctaaagcaagcttggatactacaagctctccagaaaaatcggatgtgactgctgaagaccaagtagtagaaccaaaagaagaagtgcaagcaaaatcagaatctaagaaagaaacagaagatgtggttgaacctgcgacaaatcctgcgcctgccgtctctggacaagaccgtgaagcaagtgaagctcaaccagcaaccaccccagctgaagtacaaaaaggtgtagccgacaacactaaagatacggttgatgttccagctacatacttggacaaggccaatttccctggtccattcacagccggtgttaaccaagtcattccatatgaattcttcgctggtgacggtatgttaactcgtttgattttgaaagcctcagacaaggctccatggtcagacaatggttcagctaaaaatcctgctctcccaccagtagagaaattgggcaaaggtctttacttctatgaagtggatttagcaggcacccaaggaaaatcagataaagagttgcttgacctcttaaaacaaaacggcactcaaagttataaaactaccatcaaggtgtacggagctaaagatggcaaacctgacttaacaaatcttgtagcgactaaagatttgactgttaatttgaacgcttcaaccactccaactcagattaaagagtctattgttaacaatgtcaaagacatgattgatgttccggctagctaccttgataaggctaaggttcctggacctttcttggccggagtcaaccaagttataccatacgaagcttttggtggagatgggatgttgactcgccttatcttgaaatcatctgacaaggccccttggtcagacaatggaatggataaaaatcctgctttattgccacttgaaggcttggctaaaggccaatatttctacgaagtggatttgaatggcaatacggttggcaaagatggtcaggccttgctggagcaagttcgagctaacggaacccatacgtatctagctactgttaaagtctatggcgctaaagacggcaaacctgatttgaccaatctgattgctactcgtcaagtaacgattcagcttcgtggaaaagaaatggcgacaataccatctcaacaaggtcagatgaatacgaagccttctgaaacaggctctacaggtacgactgagggtatgatgggtacaaatcattatatgtcagatatgaaagtagatcaaccagcttctagcccaatggctaatatgatgaaaaaagatgataaagcgatgctaccaaatactggggaagctaaaacagctacagctggccttggtatctttggtctaaccttggcagggcttgttggacttttgggtttgacaaccaaacgagaagattaagattcaaatcacttaaacattagagaaaacagtgttatactaaagcaagtgtaacactgtttttatcgaaggagtgtcaaatgaaaaagacaattttgctggttgatgatgagataaatattctagatattcaaaaccgctatcttatacaggctggttatgacgttttagtcgcccatgatggtaaagagggattagagctttttagaaaaaaatctatcgaccttattatcacagatatcatgatgcccaatatggacggttatgattttatcagtgaagttcagtatatcgccccgaatcaacccttcctctttacaactgctaagacaagcgaacaggataagatttatggattaagtttgggggcagatgattttatagtcaaaccctttagcccacgcgaattagttttaagagtgaataatatcttgcgtcgccttagctgtgggggagagacagaacagatcgagtttggtgacttggtaatcaaccatgtgactcatgaggtccgtcttggggagcaacctttggaattgacagtaaaatcctttgaacttctatgggtattggccagcaatcctgagagagtcttttcaaagacggaactttacgagaaggtatggcaagaggactatgtggatgataccaatacactcaatgttcatattcatgctttgaggcaaaaattgaccaagtatacgaattcaaatgctcctgctatcaaaactgtctggggtttgggctataagatggaaaaaccaagaggtagaaaatgaaattaaaaaactatattttagtgggttatctagtgtctactatactgactattttggtcgttttctgggcagtccaacgaatgttgattgataaaagtgaagtttactttctagttggaatgaccttgattgctagtttcattggcgctgcagtgagcatctttcttttgtcgcctgttttctcttctctgaaacatttgaaaaaacaagctcagaatatagcaagcaaggatttcagcacagaaattgaaaccaaaggcccattagaatttcaagagctagaccaggcttttaatgacatgtcccacaaattgcaggctacctttcaatcacttgatgagagcgagcaagaaaagagaatgatgattgcgcagctctctcacgatattaaaactcctattacctccattcaggttactgtggagggaattctagatggagtgattaaggaagaggagcggctccactacttatccacgattggtcggcaaactgagcgtctaaacaagctagtggaggaattggatgttttgactcttaatacacaacctcaagatactgctgatgaagaagtcgaagagatctttttagatcagctgttgattgagtcaatgagtgaatttcaactccagattgaacaagaagagcgagatgtttacattcaagtgtcacctgagtcggcgaaaatcaagagccattctgacaaactttctcgcattctggtcaatttgttaaacaatgcctttaaatattcagaaccaggaaccagaatcgaggttcttgcccaattaacagaacaagagctgacaatcagtgtgaaagacgagggtcaggggatccttcctgaagatttggaaaagatctataaacgcctttatcgtgtcgaaacttcgcgcaatatgaaaacaggtggtcatggcttaggccttgcaattgcacgagaactagcccatcagcttggtggcgaaatcacagcagaaagtcagtatggcttaggaagcaagtttacattcagccttagtttgaaataaaaccgtaaaatccctttacaaatctagctttttttcatggtgcaatagcctttgtgtgaaattgcagcaggaaagcatgaagctcgtcaacaggtgcagtttatcactatggatatgtctggggcttatattccacttgccaaaaggctttttccaaacgccaaaatcgttcttgatcgtttccacattattcagcaccttagtcgagcctttttaaagacaagaatttcgattatgaaccagtttgataagaagtcactaccctatcgagccttgaaaaatcactggagactctttcaaaaggacagccgtaagttatctctcaattctttttactcacaaaccttccgacaaactttagtaccacatgaaatcattgagaagacactaggcctttcagaagagcttaccgactactatactctttatcagcttttgctttttcactttcaggagaaaagagtagatgagttttttgagctcattcaagaaaacttaaatgtcgtcaatcattattttcaaactgtctttaggacttttcttagacacaaacaatacatcaaaaacgcactagaaacagactattcaaacgcaaaactcaaagcgactaacaagttgattaaagacatcaaacggttgggctttggttttagaaacttcatcaactttaagaaacgtgtcttcatcactctgaactaatcataaccacccgtctaacgggtggtttgatcatgggctataagcccataataccagccagcgcctaaagacgctggctttcactttgttcaagccttattgcttttgactcgtcacaagcctctcaaagaggcattcgcattacttaccattatccctgaagggattttcatattcttttacgcttaatttgtccaaagcgatatcatgcttctcttgttcctgaatatatttcttaattgtggcttcattaagtcctaccgtacttacataataaccttctgcccaaaaatgtctgttaccaaatttatattttaaattggcgtgtttatcaaacatcatcaatgcacttttaccttttaaatatcccataaaactagctacactcattcgtggtggaatactcactagcatatgaacatgatctggcattaagtgaccttctattatttcaacgcctttatattggcatagtctatgaaaaatctctcccagactactcctatattgattatagattatttttcgtctatacttaggtgtaaatacaatgtggtacttacacatccattttgtatgtgataaactgtgagctttttgcgccatagtcttaactcctttcgttttacaattggcttgaacacctatattgtaactcgtttggagtttttttgttatgacggtataaccttcgatgcgcacccgcatagcgggtggtttatttgtttcgcacctttggagcgaaacggacttaaagtcacataataaaaagaggacctatccggtcctctctagatgttacttttcgtcacccactacagttgacaaagagcctattaaacacaaaagtcacccatgtgagttcttgccagaagctgaagttaatccttcaacctggaaaacccgcagaggtgactttttctatacatctcgatttttctggcaataatcattaaccgataaatatgtctgtgaatcacccagcgactccgctatgtccataatccgcggtggtagtaatcccactcgctggacaagttcgtgatcgctgaacaattcccgtggactgccggcgaagccaaacttcccgtgttccataacatacaccgactcaaactcggcggcgacccaatccatgtcatgggtgatggtcacaacttggtggcccgaatcagccaactcatggaaaattgcggtcaacttgcgccggctttcccaatcaagcgacatcatcggctcatcaaataaataaatcgccggatccactgccaaaactgtggcaacgctcaacagcttgcgttccgacaatgacaggtcatatggactttcagatgttttatcatccaagccaactctttttagagccgctaaagcccgcctcgtaatcgtgtcgtggtcatccatgacctgcgcgacactccactccacctctcgttgaacggtcgggttgaaaagctgatcgtcaggattctgaaaagtaatcccaaccttcagtaacttttcgactggtttaagatcattaaaattttctccatcgatcttaatcacaccggtttgtggtgtcagcaagcccgtcaacaatttgaagagcgttgatttgccggcaccattttggccgacaatcgccaccatcggatcggcgaagtgtttgtcttcaacatccaagctaaaggaccgttccggataagtgaacgtcaggttgttcagttcaattgtggacataacgaacctccttcagatcagcgtaattcaccggataccggccatcagccaagtgccaatccattttttgagcaagttgctggattgtcggggctggaatctgccagtcagctgccaaatgattaaacacctcacccggcctgccctgggctaccatttgaccctcgtgcagcacccacacaacgtcggcgacttcgcacaaatcgtcaatttcactggtgacaatgaagacagtcgtctctttgacttgggccagccattggaaaaattgtcggcggccaaggggatccatctgactggtcggatcatccataatcaaaacagccgggttagccgcaatcgccgtggcaattgccaaccgctggctctgaccaccggaaaggctctcgggacgcaaattcaactgttcaatcagccccatttgcgtggcaacttcttcaacccgtttttgaatcagtccttcagccattccctgattaatcaagtcaaaggcgatttcatcggcaaccgtgtctgccaacccgcttagttggccagctggattttgcagtacaactccattcatggcattataaacgggccaattgtcggacactcgctggccaaacatgtgccagtcgccctcaatctcagcagacacaattttaggaatgacccctgctagcacatggcacaaagtcgatttgccggagtggctattcccgataatcccaaccacctggccggtatgaacctccgcgttaatctgacgcagttgtggttgctcagtacccggataacgggtagtcaaattttcaattacaatccgtttattttcgtccatatcttccacccaatcaataaaattgccaatccagtcagaccaatgtgcagcgtccgcgacaggcgatacacgcgctgggaggttctgacagtacggttgagattatcaaaacctctcagttggagagaaatcgaccgcgtcatcgattgatccaaggtcttaatcaccaatggaattagaaccggcaggactgactttaatttctgaatcaacgttttttgcggattggttccgcgaactttttgtgcctgctggattttccgcatattgcgcatcatttccggtaaaatataacacaccgacatcagaacgtagacggttttataagacaatccggacagttccaaataggccgcgttttctgaaatactcgtggtcaccataaaaaagccactggtcaaaataatcaccaatactcgacaacccagagtggtggcgtaaatcaagccttctttgtagaacgacaccccaagcacagaaaacagcacagtttgattccgactgtaaaataacccttggatgatcagcatggtgcaaatcagaaacaggctgaatcccagcgccttaaagatggtagaactcaatttggaaaataacaatagcagtgttgcgacaagaattaatccggcctgaagcaataaattcatactggcaaagctcaacaacgtcatgtccaagatgaacaagagcttagtaatcggatcgatcacctggtaccacttgagcttgacccgtggcgctccagaaatcaatgtttgatcagtcatcatttatcaccgctaaagaagtgcaccatccgcttcggcagctgacgatagatgaagaatgccaggtaggccacgcagactttatccaaaatatccaagacaaactcatcggtaaatgaggccagccacactggtgcatgattggcgaccattaccgcaaacaatgagtcaccccaagcgataccggtctgaccaccccaaaagatgacgttgagtggcgttgaaatgacagctgaaacgaaggcaataataatagcagaaacaaatactcgtcgcgctgacgagaaccacccattggcgtgcaaaactccgacagcaatcccaattccgatgctggtaatcgcatacacggttgaaattggcgataaggtcagcccatagatcacgttgttgatgaaaccactgatggcaccggcaaccggcccagccaacatgctggcaagaaaggttcccaaagaccccagccaaacgggtaactttaacccctccgccaaggctttggcaacatagttaatccccacggcagcgggaatcaaagtcatggtggcagcacttaacttaaatttccacatactggtacgatgaatcggttctgttttcataatcttctccttttgtttttaaagagccgtgtcaggaatgactttcggacgcaacgctctatagcatagttattagaaccatatagtcacttcaccataccaaccgtagtcgacatgagttaatatagtaaaattactattttttaaaagttcatagtcttatcatacgcttattttcaaaattgtcaagtcttttctgaatattctttaaaaaatgttgtaaaatttaaaatgcctagcagagctagacatctttcgactggtattttgttttcattactgtcacaaatacttctacgctgttgtcattgaccaaaatttagtccatgacataaatttctccacgactatatagggcagcctttcctgcaaggtaaatcctatcaccctctatacgacaaaggaggatgccactcctttcagaggcttggtaagccctaaattctgcttgtgccaacttattagcccacaaaggaatgacatgacagtgtcctgatccacagactggatcttccttgactgataattttggagcgaaacttcgtgtcacagtatcatacttgcttcctttggcagtgatattcaggaggagcccatctaaagcttttactttatcaaaatctggacttgcattaatgacatcattttcatgaggtaagacacaaactagatctcttccaagccatgcttcaagcggacggacgccgattgcttcttccatctcacttgtgaccgcaacctgttgcatggaatatgctggaaaattcagctcaaagtactcaccttttttggtaactaaaagttccccactctgtgttgcaaaagttaaactttcaacatccttttcaataaatcgaaagagaacaaaggctgttgccaaggtagcatgaccacacaaatcgatttccccaccgggagtaaaccaacgtaattcatagtggtcaccatttttaaccgtaaaagctgtctctgaaagattattttctttagcaatattctgtaaagtatcatctgacaaccatttatctagaagacaaacagccgccgggttccctttgaaaacagaatctgtaaaagcatcgacgataaattgttggatggtatattgactcattgacatagacagctccttaaattgttaaccttgttttaaaactacaagtgagtgtagaaaatttagtaaataatcaaattaaattatttcttgtccatctacaccttaccccttaaaccactccatccctggagaatccagtataattttggtcaattgttgtgggctttcttgagtcccattgataatccagtcgacaataagtcctgtcaaaccagaaacatacatggtaatagcatagcgctctggcatttgataagctgccacaatgactggtcgagaacgtggtgttgactcaatcatccccaaaataaaagaacgaatgttgtctgcaaaacgaaagcttggattttttgcaatttcagaaaaaaaagcactgttctcttggaaataagacaagatggcttctaaggcttctttgggataagaggtttctttccttaaaatcatacgaaccgtcgttatggtttcttcttttaattgctctaaaaaatcctgtttatctaggtagtgcagataaaatgtcgagcggttaacacccgcttttttggttaactgactaatcgtaatatcctctaagtttcttgtcgctaaaagctgaatgaaggcttctttaatatctgacttagttgtcgtttgtctctgctgcatacaaaccccttgtttctacatattgttgattaaagtatatcttgatttttgtaattgtcaaccatcatcaaggattttcatttattaatatcactttcgtatccttatttcaacacattgttgttttttgttgtagcaatcgtattaaaaaaatcataaaataacgttcgtaatcattcaacaggttgttgttttagcagccgataacttttaaaggagacaaatacacatggcgtatattgaaatgaaacatagttacaaacggtataaaacaggtgatgtggaaatcatcgcaaacaatgatatcacattcgagatcgaaaaaggggagttagtgattatactcggttcttctggggcaggaaaatcaactgttctcaatattcttggtggtatggataccaatgatgaaggaaaggtcatcatcgatgggaaagacatctccaattttaatgcgaaacaattaacagcttatcgcagagacgatgtcggattcgtctttcaattctataacttggtctcaaacttaacggccaaagaaaatgtagagttggcttctgaaattgtcgcggatgctaaagatgcggaacaaactttgattgatgttggtctaggaaaacgcatcaacaacttccctgcacaattgtctggtggtgaacaacaacgagtagctattgctcgcgccgtcgcaaaaaatcctaaaattctcctatgtgacgaacctacaggagccctggattacaatactggaaaacaggtcttgaagattctccaagataaggctcgcaatgaaggagctactgttatcattgtcacccacaacggggcgcttgccccgattgctgatcgtgtgattcatatgcatgatgcgcgtgttcaaagtattgaactcaatgcaactccacaagatattgatagcctcgaatactagaaaggatatctcatgaatcgtaaaacttattggaaagatgtcagaaagtctttctctagttctaaaggacgggtggtttctattgcttcactcatggccttgggttctttcgctcttgtgggtctaaaggtgaccacccccgatatgcaacacacggcaacaagctatttcactaaacaccaaacagctgacctcacagttactggtagctatggacttaaccagtcggatcaagacctcttaaatcaagtctcatcagaggcaaacattgagtacggttactttaaagatgtcgttctgaaagattccactgatgcctttcgattattttcaaaaccaaaagatatctcaacttatgaggttgtaaaaggaaaacttccaagtaagcaaggtgaaattgctctttcttcagtctatcaagacaaatataagattggtgacaagatctcgttttctgaaaaagaaggtgacaatggtaaggatgtcttaaaagaacacacctttaccatcactggctttgttcagtcatctgaaatcttatcaagtgttgatctcggttcatctacagctggtagtggggaactcaaaggttatgcggttgtccctgaatctagttttgattccgacgtctacatgattgcacgcttagcttacaaagacgtcagtactgctaacccctatacccaggattacactgacaaggtttccaaacacgaggatgagctcgaaaaattagtaaaaaatcaacctgctaaccgtttgaaagaattaaaagctgatccacaggctgagattgaccaacaaacaagtcaacttcaaacggcagagactgaacttaacaagaaactagaacaagcaaaagcgagcggtcaggataagaatcctcttgtccagggacaattgacacaagcacaagatgaaatcgctgaaaagaaggagcaaataaaggaagctcaagaaaaactcgatagcattgctgaaccaagctacgatgtctacacacgtcgtgaagctccttggtcagaagggtacgtttcatatgagaccaacgcttctgtttttcagaacctcagtaatatcttccctgttatcctctattttattgctgccttggttacctttgtaacaatgggacgcttcgtcgaagaagaacggattaaggcagggacattcaaagctctcggttaccaaagcaaggacatcatccgtaaatttattatttatggatttgtgacgagtatgattggtactgctattggggttgctgcaggtcacattctccttccaactatcatatacaatagttataaagagcgaatcctcctcgcaccgattgagttacacttctatccgtttaagactcttctagcaattgtgcttggtcttttgtccacagttcttcctgcctttatggtagccaagcgcgaattaggtgaaaaaccagcccaacttcttcttccaaaacctccaacatctggttctaaaattcttctggagcgcatcaccccactttggaaccggatgaactttacacaaaaagtcactgcccgtaatattttccgctacaagcaacggatgttcatgactatttttggtgtctgcggttccatcgcacttctctttgctggactcggtattcgttcttctatcggagaccttaacacacgccaattccctaacatcattcgctatgatatgattgtcgcaaacaaggatcatctagatgagcaggaaaaggaaaacatccaaaaattaattaacgatagcaaggtcaaggaacatctttctattcattacgaaatgctttcaaaagaggcaggaactaataacgatcgtcaagatatcacaacccttgtggtcaaagacaaggatcaagaaactctacaacattacatcaagctcaataatcgtgaaactggtcaaaaactcgaattgaccgacaaagggattattatttctgagaaattggcagacttagctggcgtttctgtaggagatgagttaaccgttcaaaatagtcaagacaaggatatcaaactcaaagttgctggtatttctgaaatgtatatgggtcacttcatctttatgaatcaaactacttacagaaatgcttttggtaaagaggcgagccaaaacgctactattctaacactgaagaatcactcagacaaaaacgttgagcaaacagccagtcaatttatggagcttgatggtgtcaaaggggttgttcaaaatactactctaaaggcacaaatcaagaccatcgtcaactcccttagccgtgttatggcagtattgattgggatttctgttcttcttgctttagttgttctctttaatttgacaaatatcaatgtggcagaacgtatccgtgagttatcaaccattaaggttctaggcttctttgacaaagaagtgacattctacatctatcgagaaaccatttatctctctatcattggtatctttgttggattcggacttggttggggattgcatcaatacatggtagaggttatccctcctgaaaatatcatgttcaatccaggtctgagctggctcatctatgctattccaacacttgtagttattgtcattctgacagatctcggtatttttgtgaaccaacaccttaagaaagtcaatatgctcgaagccctaaaatctgttgagtaacatacgatttaagctaataaagtagagctaaagtacaaggataaattccctgttctagacaaacgtcattgtgggcgtttgtcttttttattttttaaatgatttactttatcatcttgtatttccatccaaaaatctgatttggagcaaaataaaaagggatattcgctattcatttcaccaattttttgatagtgaacaaggagacacattcttttggatgactcttatactccagtcatctatgtcatgtaaatacaatagtccagacaagggcatgatggaatccttctttagtatttaaaaatcggaaatgttttatggttatgagaagacgtttaagtcaattgagcatttggaacaagctattgtagactatattaattatgacaacaacaaacgcattaagataaaactaaaaggacttagtcctgtgcaatacagaactaaatcctttgcttaaataaattgtctaactttaggttagtacaaaatcagtttcttttgtggagtcaaaggactactgtcctaggctctttttatcgtaaccaactttcgtctaactggcctttacttttgccaaaagctttcccatgttcatcaatgacagcatgaatctcttggcattgtttaagagtgaggccttccaaaacgttaccataaacagcgtgcatgtcattataggtatcaaagtttccaaatcctaagcgtcgaaaaagtcttctcgcatattcatcagaaataaaaactggacgatcaaaaagataaagtaaaagtgcatctgcagtctctggtccaatcccttttaactccaaaagttgcttccataaatcttctgttccaatcttggacagaacttcaaaaccaccaacttctcttaaccagatcagaagtcccctaatcgtttgagatttttgcttaaaaaatccagcaggtcgaatacgttcctgtaactcttctagcggtaaagccaggataccctctactgtcatgacatccataagaccagctaaagccaacttagcattcttctctgttgttcgctgaatcagaatagtcgataccaaatcttcaatcttgttatccgattgccaccaattttgctctccatagtgctcacaaagtcgcaaaagagtttcttgtattttttcttgcttgatcatttcttcaatagtccctgtttgaccaaaaactcacgtgcgactttagcagcaggttttccttctactcccacttggtagttcatctgactcatttggctctctgtgattttaccagataacttattaagaataccttccaattctggatgtttcttaagaagagcttctttcatgaggggtgccccttgataaggtgggaagaggtgttggtcatcctctagaacaactaaattatattgagcaatttctgggtctgttgaataggcatctgttatttggatattgccttgttggattgcctcatagcgaagtgccggctccatggtagccacattaagatttagtccataaactgattgaagtcctttgtttccgtcctcacggtcgttaaattccaacgtgaaaccagctttgagcttgtcctgaactttcttgagatcagaaatcgtcttcagattatactctttcgcaatacttttcggaacagcaatcgcataggtgttttgataagccatcggtttgagtaaagctagattatcttgtttctttatcccatcacgcgcaacctcgaaaacttctttggagtcgttgctgactttaggagctggtttcaagagagagcttgtaatggtccctgtaaattctggatagatatcgatatcaccctttttaagcgcttgataaaggaaatctgtcttcccaaagttaggcttaaccgtcaccgtcatgtcactattctcctcaatgagaagcttatacatattcatgagaatctctggctcaggtcccaatttaccggctatgactagattttctttctctttctgaggcatcatgcttggtgcgtaacttgctcccaagccaagcaacataatagcgaaagctgcaaaaatcgtgcgtaacttggccttttccatccattttagaacaatattgaataaaatagcaagaagcgctgatgaaatggccccaatcagaatcaagctataatttcttcgatcaatacctagaaggataaaggaaccaagtcctccagccccaatcaaggctgccaaggttgctgtccctataatcatcaccgcagaagttcttacccctgacatcaccacaggcatagccagtggaatctcaaacttcttaaggcgctcccacttggtcatcccaaaggcaatcccagcttcttctaaactagggtcaatcccacgcaatcctgtaatggtattttgcaaaattggaaatatcgcataaatgactagagctgttaaagtaggtagcgttccaattcccataatagggataaagagtcctagaagggccatggaagggatggtttgaaagacaccagcgagttgcaagacccagttactcgcacgttcacgcgtgctaagataaatggccaaaggaattgagaggaaaattgcaataattaaggtcaaaagagacaattgtaagtgctgtccgagagccgttaaccagtccccaaaacgttcttgaaaagttgaaatcaaattagacatgaaggctacctccaaacaagtttgctacaaattctgtcgcaggcgcttctaaaattgtttcaggttctgcgacctgatgaatttctccatcctgcaaaacagcaattcgatcccctaattttaaggcctcatccgtatcgtgtgttacgaagatggtcgtcatgccgaattctttatgtaaggacttggtcaattcttgtaactgcttgcgagagatggcatccaaggctgaaaaaggttcgtccatcaatagaattttgggttccccaatgatagctcgcacaatgccaatccgttgttgctctccaccagataattcactaggcatgcgttttgcatactctgcagcaggcaggccaaccttatccaagagttcttctgttttagaagcaatttgttctttagtccagcccttcatctcaggaatgagagcaatattttccgcaactgtcaagttaggaaatagggcaatggcttgaaggacatagccggtactgagacgtaactcccgttcatcatagtccttgatgcgtttcccatccatatagatattgccatctgtcggctccaaaagacggttaatcatcttgatcatggtggtcttaccagatcctgaaggtcccacaagaaccatgaattctcctttttcaatgcggagattgacatctttaaggacatctttttcagtgtagcgcaaggctacatgtttgtattcaatcatatttttcctcaataagttttctgtctctaagaatatccaataagctactttctggacgtcctaagactttttcgacatctgttgaaaccccagcttgttccccaactttgatagctgtataggtactgacccaagcatcgtactcccagttttgtgctggccattttttccttgactcataggcctcttctaccgattcgtctacatacgtgatggcattaccggtctcttttgagagaagctctacgatttcttccatagaaagatcctctggtcctgttagattcaaggtttgattttcccattccttagggtttaagagaatctctgctgcgaccctagaagtgtccttacgggcaacagctgacacacggcccctgccagccggaccacgaatttctccattttcaagagcaatatcaataaagaagtccaagtaaaaattatctctcaaaaatgtataggtgaatcctaacttcttgatataggcttccgtctgggcatgatctcgagacaaggtaaaggttgctttttcatctgctccgtaaaaggaggtatagacgatatgctgcactccaacaagctttgcggcatctaaaaagtccttgtgctccttgacacgctctggattttcccgagcagagaccatcaacaaagtatcgataccctttaaggcctcaaccacctctggagtattggcatacaccattttacggatttccgcagacgcgtagacttttgcacgctctggacttcgtgccagatggatagaagaaattccttgctgatcgacaagatcagccacataagagcctaatttccctgttacacctgttatcccaatcataactgttacttcctttccctacatatcattttctttagcttttagatttgtgataatacgctcttgataggcttcaaattctcggatttcttgatttgaaaagccttggtagaaaatctctcctagttctttgctgacacggtctccaatttctttttgcgcccaaccaagttcggtcaaaacgacaaacttcttgcgcttgtcctggtcactctgttcaatcgtaaccaagccctggtcaactaatttcttaatcatactagtcagagtattgtttgctagtcctgaagcaagggcaatatctgtcgcagttgctcgaccatcttctttttgccaaagcactgttaaaatttttccttgttcacttctatattgagcttctggttctttgctcaagagtttttgaaaaatacgcccgtttaacaatcgaatctgtagagtttggtagccccctaacatcttgtccattttgtctcctttttgttccatatcgaactttatagtacgaattgtaacacctttcgttacatctgtcaactatttcgatatagaagtaacttcaaaaaacaaaaaacttccctaattatctaggaaagtcctttctatgatttttgctgtctttaaaaaattttattcagccttagtaatatcttcgcgcatctcatcaacattgaatttagcaaaaagatactgacggtcttgaactgggaaacgttggtcgagttggtcaactggaccaacctcgataataccattttcaataacaaagtccataacgtgaccaccaaaagtcaagtcgtccgaaataaaatgaaggtgataaccagcaacactcacaccatggaacatttctggtgtccaaataccaacgatggtacctgaaatatcatctacctcatactcaggttggcgagtggcaacatccgcaaacttaatatcggcatttgattttggaatcatgcgcacgtgcatatgtttaaaatgacctttgattttgatagaacggaaaagattgaccccgtcataataagattcaatacgatcctcaagttctttatcagtcatttcataacgttgacggaagataacttcagcttggtgaggtacgactgctgcataaggtactttttcatcaggagaaacttctaccacttcgaccttaccctcagaccctttggcttgataggctttaccgtcaagaacaatcaactcaccatcgatagaatctaatgttccgagacccaagtctccatgctccaacaattctccaactgttaaagtacctccataaagcccagccatcaaggctcccaaagtattatattgaaataattttatggcttcagacatgtctacaccctctttttagtaaaattcatctggcaaaatagtttcgccgagtttaatattgtctttatagtcgattggaacatcaataaggactggtccatctacagcttgagccaaagcttcttgaagcaagctagcaaactcttctttacttgttgcacgataacctttcgctccaaagctctcagcatattttacaaaatctacaggaccaaagtcaaccccagatgaacgaccgtacttcatttcttcctggaattccaccatattgtaatggccatcgttccagataatatgaacaattggcaatttcaaacgaactgccgtttccaattcttgtgctgagaagaggaaaccaccgtcaccagaaacagaaatgacttttgtcttaggacgaaccaaagctgcagagatggcccacggaagagcaacccctaaagtttgcatcccattagagaaaagcaaatgacgtggttcataagatttgaaatagcgagccatccaaatatagtgactaccaacgtcaacggtgactgtcatatcatctttggtttggtcttgcaaaacttcaatcaaatctagcggatgtacctttccttcttcaggttggcgatcaaacttaacatcctcaacaacgttattcttcaaccctttaaggtattcaactgatccttcaggtaatttataaccttgaatagctggcaagagcaaatctaaagtcgcttctacattaccaatcaattcacgttctggctggaagtaagtatccacctcagcaggttcaacgtcaattacaatgatacgtgctgaaatttcagcattccagttacgtgcttcatactcaattgggtcataaccaatggcaataatcaagtcagacttcttaagcaacatgtctcccggttggttacggaaaagacccacacgaccaaagaaagtatcttcttcaaggtcacgtgacacgataccagcaccttggaatgtttcaacaactggcaatttaacatgcttcaaaatttgacgaatagagtaagtgacggcttctgatgaggcaccattccccaatagaaagactggcaatacagcatttttaatggcttgtgcgagatagttaatatcagaaacagatgctgaaccaagttttggatctgtcataggcttaatagccttaacactgactggagcatcggtcacgtcttgaggaattgaaataaagcttgcacctggtttccctgacttagcgtgacgataggcatttgctaccgtttcagaaagggtgttagcatcatgtacttcagcagcatacttggtaattggttcaagcatggcaacattattcattgattggtgggcacgtttcaagagatctgcacgcttaacctgaccaccaatagcaagaacagggtctccttcatctgtcgctgttaccaaaccagtagccaaattagagacacctgggccagatgttaccaatactacaccaggtttccctgtaatacgtccaacaccttgagccataaaagcagcattttgctcatgacgggcaacaatcaattcaggtcccttatcttccaaggtatcaaaaaccctatcgatttttgcgcctggaatcccaaagacataatcaacatcatggttgatcaaactatcaaccactaaatccgcaccatacaattgcttttcttctgacatgaacacagtccttctggccctaaaatgatagagccaactttcctttcaagtataagtcacaaagtgtcaaagtctgctcgttttttcacaaactttcgtcacttcacaattctgttatcattatagcacagttttctgacaatcttgtgaaaaaaagattgtgaaattttgaacttccagcacaaaaagaaacacctgattgctatcagatgtttatgcattttttaccttagcaaattctcgattgagataattttgcaggccttcaaaaatctctagtaactgaagataattagacaaacttgagcgaccagggatatcaacgacatccaaagaaatgcggtccaagtccttttcgtaaagaatacggaaggataccactgcgtgatcagaaaaataattttcccctgccataatgtagcactcatagatgatgccaacaggattcgcaaccttcaactcaatacgaattgcccctaaacccaaggcctccacttgctgaaaacgttccagaatagcctgtcgctgactaggaataaaacttgtgatatccatattggccctcccaacattcctttttgtttattatagcctaaagatgagaaaaaagcttgtgtagggtttgtagaagccacatagacattcaagaatacttagtcgccccctttgtagtctctaaagtctgacttaatggtggaatcataatcatgtttatccacccaatcctttatatcagcaaaagaatggatatctttcttaataccagcactatcctctacagaaactacaattgtatcttctccatttgttcccaaccaatgtaagatatcatttgtttgctcttcaggagaaaaatagatttgtgattgtctttcgtactctctatctctataagactcatattgagctaattgctttttataggtattatattccctatcgtaatccttttgaactttttgacgtgctttttcgtaagctcgatagtctttctgatagtcttgttgagcctttttgttaagaatctcactgaaacttaaagttttaacaggaaaaatagaatcaggaaaaacatttaattctgaaactttctttggttcacttggcttatcaggtcctttccttttcaatggctcagttggaccagctgggaaatctccctccttgccttgacgggtcaatactttaaatttctttattgtattactatttgttggtgtctgatttacaactacttggtaaatatgcttgactccaggattgttattaaatagattaatctgactctcctctttggcagtatccacattatcaatttctatgataaggtttagctgagcagataaatagctgtcctttggggctggtgacttacttaaaagctcatccaagtttccttctctctttaaatatccccacatggtgctatcattcatctgattacgagcagaactcttatcaccaaaataaagcaattcatccttactataagaataatctggtaaattgctagttaaaaattggttcgtatccaaattgtaagcgaattgcttgtcgcttcgagtattcctcaagaaaacataatcataaccatcaatcgttcttaaagacacagtcaactctttgatttccttaaaatccttggctttcttcaaatatggagtcaaattaataattttctttttaaaatctttgttaacatcataaactaccaaatgagcttgatgcagactactcatggtatcgtaatagcgaacaaaatgatttctaccaatcaactcagtcgctaccttatcttcagaattataaaaagtgggttcttcctgactaatggcaacatactgatggcgactaccgaaaatctcattgtcagttaccttatccgcttttagagcagtctgtaattcctctacagctttttcatgaaatttatgtttgacataagcatttcctaaaaagaaaagtgtgagtaaagtcgcagtataaatccttccacgcttcgagaagggaaatcttaaaatcttctttatcataacttttatacaaaaatagccagaacatcacattctgactattactcttatttctcatcttcgtccattgaaagtactgacaagaaggcttcttgtggtacttcaaccgaaccgatggctttcatacgtttcttaccggctttttgtttttcgagaagtttacgtttacgtgaaacgtcaccaccgtaacacttagccaagacgtttttacgaagggctttaatatctgtacgggcaacgattttttgaccgatagccgcttggataggcacttcgaattgttgacgtggaatgattttcttaagtttatcaacgataagttttccacgctcgtaggcaaattccttgtgaacgatgaagctaagagcatcgaccttgtcaccattaagtagaatatccattttcaccaattgtgaacggcggtattctgacaattcatagtcaaagcttgcataaccacgtgttgatgatttcaatttatcaaagaaatcaaagacgatttcggcaagtggaatctgatagataacattaacacgattatcatcgatatattccatggtttcaaaatcaccacgtttacgttgtgccaactccataaccgcaccaacatattcttgaggaaccatgatttgtgctttaacataaggctcttcgatagcatcaatgcgtgtaggatctgggaattcagatgggttagacacttcaagcatctcaccgtcagtagtattaacatggtaaactaccgatggtgctgtcatgatgaggtcgatgttaaactcacgttccaaacgttcttggataacatccatgtgaagaagacccaagaaaccacaacggaaaccaaaaccaagggcttgagacgtttcaggctcaaattgaagactggcatcgttcaactggagtttctcaagggcttcacgcaagtcgttatatttgttggactcaattgggtaaagacctgcaaacaccattgggttcatttgcttataaccatgaagtggctcagcagccggattatccgcaagtgtgacggtatcaccaacacgagtatccgcaacagtcttgattgaggctgcgatataaccaacatcacctgtcgcaaggtagtcacggcctacagctttaggcgtgaagataccgacttctgtaacgtcaaatgtcttaccattagacatcatttgaatcttatcgcctggtttaaccattccgttaaccacacgcacttgaaggataaccccacggtaagcatcgtaaacagagtcaaagataagggcttggagaggagcttcaacatcaccttgaggtgcaggcactttctcaacgatttgttcgagaatctcttcgataccaataccagccttagctgatgcaagtacagcttccgaagcatctagtccgataacatcttcaacctctgtacgtacacgctcaggatctgcagctggaaggtcgattttattgataactggtaagatttccaagtcattatcaagcgccaaataaacattggcaagtgtttgtgcttcaatcccttgagctgcatccaccaccaagatagccccctcacaggcagcaagggaacgtgacacctcataagtaaagtccacgtgtcccggtgtgtcgataaggtggaaaatataagtctcaccatctttagctgtgtagttaagctcaatggcatttagtttgatagtgataccacgttcacgctcaagatccatactatcaaggagctgcgcctgcatctcacgacttgacacagtctcagttttttccaagatacggtcagcaagcgttgatttaccatggtcaatatgagcaataatcgagaagttacgaatcttctcctgtcgttgttttaattcttcaatatttggcattttattctttcctagttcttacttgtgattgttaaaaaaacgaatcgttaccttctattatacaaaaaagacaggcatttgcctatctctaaaatctgctttctaaccttatttagtccttcttatttcttaaaattatcgttgtagtgcttattaataatagctgaacgcttgttctctgttgaactacttgaaaatggagccaaaccaaaggctagtacaacaattcccaatagaataagactgaaaaatgggtgctcagcaatatagtgtaaaatgtctgacataggaatccacctttaaaaccaaaattaattacaattatagtatcagaaatattatgttttatcaaacaaaaaaagagagcctttcgctctcccttataatcttaatggaattgcataccaccatcaacgatgattgtttgacctgtgatgtagtttgagtcaggtccagcaaggaagctaaccgctgctgctacgtcttcaggttcagacaaacgtttgagggtaatatctttagcaaaagtttgcataccccactcgtcatctttaccagcatttttaccaacttcgtgagcaatgtcaaacatcattggagtcttaacgatacctggtgcataagcattgacagtgatgcctgaatcagccaaatcacgcgccaaagtttgagtaataccacgcacagcgaatttagtaccaccatatacagtcaagttagggttaccaacgacaccagcctgagatgttgcattgataattttaccaccatgaccgagtgctttaaattgtgcttgtgcagcttgagcaccccaaataacaccaccgacattgatgttaaatgtacgttggaactgttcttcagtaattgtatcaagaggtgttgttggagccacaccggcattattaacaacaacattcaaatcgccaaagtgatcaacaactttttggaaagcagctgctacttcagcttgtttagatacatcagctacaactgcaaatgctttatctgctgacaattcagcaaccgctttttctgcagtttcagcgttgtagtccaatactccgactttaaaaccatcttcaaccaaacgttttgcaatcgcaaaaccaataccttgacctgcacctgtaacaatagcaacttttgacatacgaaatcctcctctaccaattgagtaacggacccaataacagttcttatctcaattggaatacgctaagttagtcaagttctggcaaagtcattttcataggctttgtcttaactcaattaagattctacccctttatgaaaacgttgtcaagtaattatcaaacttttctgaaaacaaataagaccaccttgaagtgaccttatttctattattcttcaaattcaaaacctaatgcttccatatcgtccaagccacctagattagtcaccttagtatagcctctctctttaaggaccgatgcagcaaattctgcacgagggcccattttacaatagagataaatgaaagcgtctttttcagctggaatgtcagcagagaaaaactgggtgtgaggtattaagagggcatccttaacatgtccttctgcatactcttctggactcctgacatcaattaacagtccacccttggctatatcaaactgaatctgtgctaaatccatcctactcaccaaaccaaatctgaatttctcgagccgcagattcctctgaatcagagccatgaacaatatttggaatcatgtcaccatctggtgctgttgcaaagtctccacgaatcgttccaggagcagcatcgcctggattagttgctcccatcatatcacgccatgacttgataacacctggaccagaaataatgccaatcactgatggaccactcatcatgaattctgcaatgctaggaaaaaaaggtttatcaaccaattgagcataatgttctttaagacgttcttcgtcaagtgtcagcatttccattcgttcaataataaagccacgacgttcaatacgatcaatcacttgtcccatcaagtgtcgttttacagcatctggtttaataataaaaaatgttttttgcatgttcccaaccttcattgttttcttttcattttaccataggaagtatcattttgcagaccaaaaccttatatagtcttaaactatacccacagaaagaaaataactattttcaatcgaaataaataaaaagtattatagatgtaaaaacttattttgaggtgaatcttatgacaaaatctaaatttcaattagttggttctctccttcgtcctgcagatctccgtaaatacaaggacgaaatcgagcaccgtgacgacatccagtatcctttctacgatgccctccctggttatcaagaaactgaaaccgcagatattaagcaaattgtggctgaccaaaaggctaatggtattgacatccttactgatggtgagtttgggcgttctatgtggcacttggactttgtctggggtctcaaaggtattgaacgttatattgcagagcatggctatacatttaaagatcacgacggcggacaatatgagactcgtaaagatattggtattcgtatcaccgaaccactctcaggtaaaaaccaccattatctagatatctacaaattggttaaggctgaagctggtgatgaagatactaagcaaactatctggggcccggctcatgcttatactgaacttgctatctttgaccgtttggctggtcctggtcaagtatatgaaacaaacgaagacctcaaaaaaggtttgattaatgcctataaagaattcttggaagaatacaaggctgtaggtggaaaaattgttcaatttgacgactgtctctgggaactctttgacccatcaaaccctgcaagtttctttgcggaaggtaattctgatttggcagaattggctgatgagtttgtagctatcaataacgaggttgtagactatgcccacgaacttggtttaacggtttggacacacaactgccgtggtaactatgaaagccgttctgctgccgaaggaacttacgaagccattgctaagaagttcttggcagagcaacactatgatcgcttcttccttgaatgggacagcgatacagctggtgatatcaaggctctcgaagccctcaaagatagcaaagctgaagttgtactaggacttttgtcatctaaaacaactgaacttgatgacgaagaacgtgttcttgacttacttgaaaaagctagtcaaatccttcctaaagagcgtctcttcctttctcaccaatgtggtttcgcctcatgtgactcaggtaatgagttggcaacaccacaacaatgggctaaaattaaacaaggtcaagatatcgctaagaaattctttggttaatggaatacttttagatttgaaaaatcccttaccgcattcggtaagggattttgatcttgtctaagcttgaataaaaggttgtaaatccttaagagcacgctcagcaattttttcgtaacgctctttcttgtcacgaatacgtggaccttccaactctttgataataccaaagttaacattcattggttggaaatgtttgctctcagcatgtgtcacataatatgggaggcttccgatagctgttgtatgagggaagataagttcctcttcacctttaaagagacgggctgcattgattccagcaactaaacctgaggccgctgattcaacataaccttcaacaccagtcatttgtcccgcaaagaacaaattagggtttgattttgattggaaagtctgcttaagcaagtttggcgaatccatgtaagagttgcggtgcataaccccataacgcacaaattcagcattttcaagacctggaatcatttggaagacacgcttttgctcgccccatttgaggtgggtttggaaaccaacgatattatagagactaccagccgcattatcctgacgaagctgaacaactgcataaggtgtcttgaaatcgccgtcacgtggccctttgtaatcctcaggatactccaaaccaacaggtttcatagggccatagagcattgtcttgataccacgtttagccatgacctcgataggcatacacccttcgaaatacttttctttttcaaaggaattcaaaggagcttcttcagctgttgtcaaagcctcatggaaggccaagaactcttccttggtcattggacagtttagataagctgcttcacccttatcatagcgtgacttaaggtaaaccttgttcatatcgatagtcgctttatcaacgattggtgcagcggcatcatagaaatagaagccatctccaccgttaagctcatgaattttttcagctagagcatcagaagtcaatggtcctgaagcaataactgtaatggcatcatcaggaatttctgtgatttcttcacggataacttcaattaatggatgattttcaatttcagctgttactgcttctgcataaccctcacggtccaccgccatggcaccaccagctggcacacggtgagcttctccattgcgcataatgatagagtccaagcgacgcatttcttctttaagaagccctacagcattggtcaagctatctccacggaaagagttagagcaaaccaattctgcaaaatttgttgtcttatgctgtggtgttgctttaaccccacgcatttcataaagttttactggaataccacgtttggcaatctgataagccgcctcggatccggccaaaccagctccaatcacgttaatataatctgcttttgattgagacatgacactaatacctcttcgggaacaagataaaatcctgcccccacaaatctttcttcatttttactcttagtagtatagcaaaaaactcctcatctggcgactaggagtcatctgtatttaaaggggtaaaatgatagttactctagcaccacctgtgccattgtcatttgaaagagaaagactaccgtggtgtaagcgaataatatcattagcaatagtcagaccaagtccactatgattgcggctctgtctacttttatcctcctgataaaagagctgagtggccttttcaagtgattcaagggaaaatccagggccagaatcaagacaaacaaacttgaattcatcatcttctaccctagcagttaagagcaactgactaccactaggcgtatgttctaccgcattcgaaaggatattcataaaagctcgattcaacaaggacctgtcccaattgcctatggtttctttcgcaattttcttcttgtcaaataccacattgatttgtttcgtttgtgataatgacaaggtttgatcgtaaatgtcttcaacaaattccttaactggaatttcttcaagcgtcaaagttttcttcaaactcgttttgttgagttcagacaactctttcacataagcatcaacctgtgcaatccctttttgaaaatgctctaacaaatccatctgttccgcatccaaggaggtcatagctaagagttcagcattcccacgggcaactgttaggggtgtctttaaatcatgtgtcagagcagaaatctgattttgtttatcttgctctgccttccaattttctatcaaagactcacgaagtgctactcgcatattatccaaaccatttaaaacccggttaaactcagtaattttagatttggacgtttgaaaatccaagtcttgctctgctattttctctgttgccttcaatattggtctcaactctcgactcaatttactagcatagtaaaaagttaaagtaataaatatgagtaggacagacaccatcattgagccaatcatcaatagattagcattaggcaaatgctggttcatccactcattacgataccgaggtgatagttgataattgacaatgactatcccatctgaccgttcaaatgactgaaaatagccatatttgccaccatgagcattcttgaattggtaatctagcaaggattcttcttgcaagttaactggcatgttagacttcttaagcttaaaatccctagtcaaaaagacatagcttgtaccatcaggcaagacatctggattaaagaccttagaagtttcaatatcattcctgacagcatgcaaatcactttctacctgatttgctggaaacaaaacgccaaaacgataagacaagctgaataaagacaaaataagtaggctactgattgctgatagaactgtaaggcaaaggacataagataacaagattgttcttagagagtgttctctttttttaattagtgccacttgtaaccaatcccccagactgtttcaataggactttgcccaacatttttgagctttgcacggatatttttgatatgttcggccactgctgtcggactccctttatcctcatagccatacaaatgcgtgtagatttgttctttggaaaagacttggcccttattttcagccagaaactgacagataccatattctgacttagtcaaatctaacaactgattctcaacatagagctcctgagcagacaaatcaaactgaatatttccaattaatagcttatggtggcgctcacgatgttcacgtctcaagtgtgcagccacacgcgcttgaagttctttaaccccaaatggcttgcaaatataatcatcagcaccataagtcaagccttgaacaatatcagcctcttgcgttttggctgtaataaagagtataggacaatccacctgatcacgaatctcatgacaaaactggagaccatcaacatcaggcatcatgatatccagtaaaatcaagtcaaaccgtggcaacgagttcttatctaaatccaaaacacttgtaagggccgtcaccttatgattttggagctctaaagccttaacaaccaattgaacaatatcttcctgatcatcaacaacaagtatctgagccataacctttcctttcgtacaaagttacccttatcatatcatctatagaagagaactgacaaggcgtaaagtagataaatatgtgttgggtaaaagacatagaacaaatattttgacccgttccctcttttaccgttataacaaagcattaagggagctgcaaatatttccatccattcaatgtatttaaacattagatcatgaatagatagcttacttaaaacaatcgtaattagtacccaaacaagactaacactcacaaaagcaagcacttctttcttaagattcttatgacaaagatacatagctataccagtcaaaagtaaccacgttcctccatcactgataaatgtatgaactggcaacactgtgaaattgagtaaatttagtagaaaacctaatataggtttgttcacacttagcagataaaaaggtaacattagtaatgggagtaatattgggaaaagtaaggttgggattccttttagatatttactttcttgaatccaagcgataccttgaagagcaacgagcaagataacgaatgacgacaacatcatattttgtggaaagaaaccatctggccttacaagaggatgtaaaaaattataaaatccaaactgaatcaatcccattaaaatagctaaagcataaatccttaggaagtatttttttcgattgtgtgtatggacgaaaccttcaatcacagcaaatagaaataagggggccgctaatctcccaatcatagcaaaccaaatgggtatttttcctgtatattcaaaaaaatattgaatatggtcgaataccatagtaattagagctatatatttgagttggaaacctgatagacttaaacgtttcataataactctcctttcttttcatccttagtataaaaaacaaatttaaggaaagtatcagtttttctgataaaatacaaaaaaactatcccaagacttaacttgagatagttttctttttatttaacaatagattctttgtagtcacactcttcgttactacagataacttgcttgccgccaccacgaactttcttctcgacgagataatcgcctgacttaggacagttacgtccaacagggatatcccacgacgtaaattcacagtcagggtagcgatcacagccataaaagacacgatttcgttttgtcttacgttcgatgacctgacctttaccacaggttgggcaagtaacgccaatttcttttgttatggccttagtattgtggcagtccgggaagttactacatgcataaaacttaccatatcgaccaagtttgatgaccattgggtgaccacagaggtcacaatcaaaaccggcaggctcatccttgatttggattttttcaataccttcttcagctttttccaattctttttggaatggtttaaagaattcatcaataaccttctgccattgttccttaccgatttcaactttatcgagttttccttccatctcggcagtgaatttaacatccacgatgtcagggaagaattcgatgattaagctattaacgatttcaccaagttctgttggttcaaaacgtttagctaccaatttgacgtagtaacgacgttgaataacatcaagtgtaggtgcataagttgacggacgaccaacaccattttcttccagcgtcttaatcagagtcgcttcagaatagcgggcaggtggttgtgtgaagtgttgttcaggcgttgtcacaactttcttaaccgtatcaccttcagccatatcaggaagcattttattcttatcagagtcgttgtaaacggccatataaccatcgaacttgatttggctaccatttgctgtgaaaatgactccgttttgagacaaggtcaccttcatcgtatcaaatacagcagctgtcatttgactcgccacaaaacgattccagataagagtataaagcttgagctgatccttatccaaatacttagcgatgctttctggtgtttggaaaacatttgacggacgaatagcctcatgggcatcttgtgctcccgaactatttttcaccttgctaccatgttttgaatacttagaaccaaagcgttccgtaataaattcagcagcctggttttgtgccaccggactgatacgtgtagagtccgtacgcatataggtaatcaaaccttgagcgcctgaaccaagattaatcccttcatacaactgttgggcaaccatcatggtcttacgtgtacggaagttaatcttattggcagcatcctgttggagagatgatgttgtatatggcaatggcgcattacgacggcgttcttttttctctactttatctacgttaaagtcatcacttgtgatacgagagagaactgcttgaacatcgtcattattgttgagcttaagctttttaccatccaagccatagaagctagcctgaaacttcttagcacccttcttaaaggcaccatcaatagtccagtattcttctggtttaaaggccttgatttcattttcacggtcaataatgagcttaagagctaccgattgtacacgaccggccgaaagacctttcttaaccttcttccatagaagaggtgaaatagagtaacccacaatacggtccaagacacgacgagcttgctgggcatctaccaagtccatgtcaatggcgcgtggctctacgaaggcattttttaccgcatctttagtgatttcgttaaaaacgacacgattcttatcatctggctctaatccaagaatatgtgacaaatgccatgaaatggcttccccttcacggtccgggtcacttgcgagaaagacttgcttggcttttttagcttctttcttcaattcattgataagaggtcccttacctcgaatattaatgtactgaggttcgtagttgttttcaaaatcaatagacatacttgattttttcaaatcacgaatatgcccaacagaggctacaactttatagttgcggccaagatacttctcaatcgttttcgctttagcaggagactccacgatgaccaaatttttctttggtgtcgctctctttttagtcgcctttttggctgtcgttttctttgttgttttagttttcgtttttgttgtcgttgctgtcgccatagactatttccttataatgttataaactggctgcgccacttatctgtctaaaatctagtcacaagacattaaaaaaaatgaagcatcttggaccgagcaactaacatgataccgtccttttctttaactgtcaataaaaaactttttctctataggagaagtttgattttcaagaaaactctgaaaggatgtcaaaccctgtcgtgatgcactttgcgccctcttgaatcaagtgatgacatccatccgattttccgtctaaaatatttccaggtatggcgaaaacatctcttccttcttccatggcacgctcacaagtaatcagactccccgaacgaagcttagcttcaaccaccataaccccttgacacaatccagaaattatccgattgcgttcaggaaagtgatacttgagaggctgttcacctggtccatattctgaaagaactaaatgattttttgccatatagccctgcaaagctttattttctttaggataataaacatcaagtcctgtcccgataactgcaatggtgttccccttatttttcaaggcctccatatgcgcacaagtatcaatcccacgcgccaatccactcacaatagtaaagtgattcccaagttcactaacaatttttcgaacggactgtttgcctgtttcagaacactttcttgccccaacaacagctagctttggtttactcagtaaatcaagattcccctgataataaaggagaacaggaggattataggtatgcttcagctcaataggatattctttatcaaaaatcgataacgtaggaaaacggtcgaattgttctttgagttgcttaatatctaaactcttatacttttccataaaaagaacggcatttttagacttggataccactgccatatcacgtaaactcaattttctatcttgagtcttttgatagtccaaaatatttaatatattcaaattcgtcaacccagcggctttaagtttaaaaagttcaaaattattcatatagatacctccttttcattattcgtaacagaaaagaaaaaagctccattatggaactttccttgattataaatcattttcagaggcaaaataagacgccgctcctaggaggttactatcgttatggaattgacaggcttgaatagttatggactcaagacctaattcagacttatccttaaataactcctcataggcatcgcttattccttctattaaagtaccttgcctgctgataccaccaccgataacaactttctccagcctaaagaagctctgcaaatttagcacaagaacggcaatttcatgacaatagtctttaaataaaagatttagctcttccgattgatttccctctatagctgagaatacggctggaccatcgtcttgatctaacccaagtaattgactggcttcatgaacaaagccaactgcagaacccttattatcgacaaggcttactaagccatgcataaacaattcccactggaagggtagagaggtttgactcatgctttggggacttggagctcgcagatattgggtgactgacagaggtgatagcaagtcctcctgtgagacaagtcctaaaccaacaccagtacctaaaaccaaggctgccccacaatctaagtcttgtagacttccatatctggcttcagccaaagctgccgcgtcagcatcattgataacctttacaggcagttgaaatgttttagtcaatcgtgatccaagaggaatagccgttaaataagggataagacctcccttgaaaatgaagccacgtttactatttatttctcctgggcacgcaatggcaatcccagaaatgatatccttgtgagacgagacaatatgctctaaagtcaaccaaaagtcgtctaacgttggtggtgttggaactttagattgattgctaatcctaaaatcatcatcaactaacccaaacttgataaaggttcctccaatatcaatagctaaaatcacaccacttcacctactttttattattgactttatgggttcaaagcttcttctatgaattggagtaacaccaaatttatctatgccagacaaatgatccttggtaccataacctgcatttttggcaaatgcgtaaccaggaaactcctggtcataatcagccatcatcttatcacgggttacctttgctacgatagaagctgccgcaattgataaagaattagcatccccttttataattgatgtttgtcctattggtaggtccaaagtcatggcatcaattaacaaatgttctggtttggaactaagtttttcaatagcatcagccatagcaagcttggttgcttcataaatattgacatcgtcaatcacatgattgtcctttataccaatcccgacggctaccgcttccttcatgacctgcgtataaatagcttcatgttttgattttggtatttttttactatcattaagaccttttattttgcaaagctttggtaagataaccgctgcagctaccactggcccagccaaagggccacgtccaacttcatcaacacctgcaatgagttcaactccctgagcataaagcgatttttcataactgagcatcatctctaagcgttcttcctcagcaatctcagctaggatagctttacggcgttgcttaatggcagtctgtacaccagcccgactatcttcctcaaaactggcccatcggtggtcgtcaagatctgtcaaagtggccaattgctctttgacttctttaattgtcgccatcagtatcgacctcaacaatatcaagtgtgtaacgacctagttttccatcacgaacttctttgacaaatagattatagaaacggtcataatcttcacggaagccaagttttcgagtcatttccataatgatttctggcgcctcttcttcaagttcaatccctttaaagcgttcttctaaacgttcaggatagtaagttttaaaatagttaaggccaaaaatcgtaacttcatccattggcaaaagctggtccttgatagctccggtcaaagcaagcttcaagccgaccaattcatcttcaaatttaggccacaaaatcccaggagtatccagaatttccaagtccttattagacttcaaccactgttgaccttttgtcacaccaggtttatttcctacaacggcaatttttttaccagccaaacgattcatcaaggtagatttccctgcatttggaatcccaataatcatggttcgcaaggtctctttctgaataccacgttcacgtagtcgttgaatcttgtcagccataagactcttagcagcgtctgtcaccaatttaactgtagattgttccttggaattgatggccaaggttttaatcccttgactctcaaaatagctacgccactcttttgtacgattactatcagcaaggtcagccttattgagaattaaaagttttggtttatcgccaacaattttagttagcatgggattttgacttgacagtggcaaacgtgcatccactaaaattgttacaaaatcaacatgcttaagattttcctgaacttgtcgacgagctttggacatgtgaccaggaaaccattgaatagtagccatgtatatctctcctttttattttcttagtaaaatatgatttaaactctttaaaaaaagccaaagacttggctttactttacttatattatatcagatttagtttaagatgcccaatcgataaaagttaactaagcctcaacaggcataaagttgccgacaattttaccgatgattcgcggatcttcgtcatagggtgcaaacttatcaccataacgtttattaagagaaactaaacgtagcccatcttcctcgcgataaacttttttaatataggtttgaccatcccagtctacagcataaacagctccatcataatcaaaacctgtttgtttgattagcactacttcaccatttaggtaggtaggttccatagagtctccaaatacccatgacgcaaaatcatgatccaattcttcatcatagaaaacttcatcatagttgccgtcaccaaagtaagtgtaaccagttccggctgataaacgctcgaaaactttgtaagagtaaagcggaacaacaggtgctttttgcttttctgcttcttgctcttctaggagagccttagtgagtcgcaaagcttcttggcgattttcctcatttaattccaagtagacttctacaatctcatgctcagaaagaaaataggtctcagctacaccaaaaagttcggccaaaaccgaaaggttcttttgattaggtttcgtcttaccattttcccaattaaaataagaggagcgtgaaattcctagatgcttagctactgatgcttggctcattccttgtgcttctcgaatttccttaagtctttgtcctgaaaacatggctacctccgtaagttaataaactaacataagtttatcaaaaaaagtagttgttttcaagtgaaactaactacttttacatttctcttttatctcattctttaactaaaaatcctagatggttaagtgcctcttcaatataatctatatcttgctcactatctgcttcgacaagatgataatgaacaccgtttgtcaaatcagataaggggcgaaagtcatttgacgaggcctggtctaaaaaatgactaacatctcgacgacaagtcaatttcaacaaagtctgaatttctccataaactggatgatctatcatgatattttgaatacggcctccattatcaacaatagccaaaagctcatcctccatatcggacactttatgattcaccttaaatagtcgatgtacataagaattgtcatcgctacttttatagatatatcccctattagttgaaataatctgggcaccatctgcacgcaagagggcaatatcttgaacaatgatttgacgtgtcacaccaaaatgctccgccaaactctgtccattcattgactctttagctccctttaagagtgccaataattcttgttttcgatttgaagccatagaccaaccatccctctttcaattagcgtatttttcgaatacttttgaaaatcgttaatgctataacatagtctatcatactatggacaatagtgccaaaaccaactaaaacaaagagaacatagaacagtttttggaaatcctctcctgttacggaataaaaaatcacgcaagcaagaacttcacctatggcatggataagacctaaaacaaagttgaaaagtaatgatgatttatggttttctatcgtttgtggaaattttttcaaatagagtgcgcctaaaaagccaaatataatatgtgaaaaggccctaaaaacaaccacaatcggatagccagccataaagtatcccaaactagaagctaagataacaaaagcagttacccagggagatataaacatggctagaaatattggaacatgactccccaaagtatacgaagccggtgggatgattagtttaattggcatgatacttgggataaggatagcaattgcagttaataaagctgcaaaggtcatttcttgaattctctttttcggtttcataatctactcctttttattgtatatacattagtatattacagtgtatagttatataagtcaatgtttttcagaaaaaaacactagagcataatgccctagcgttctatgtttcttatttacgttttttcttagcttttttcatcttattagcttgacgcttcatcgcatgtttcatggcaaatgaaccaaccttacctttaaggccaccaccaagcatttggctaagatccatatttccaagatccggcataccagcgccacccatcatgccttcaagagcagacatgtccatattacccatatccggcatatttggcatgttttttggcagattatttgggttaagacccatttgacgcatcatttgctccatatcaccagacataacaccttgcatcatttgtttggcttggttgaagtctttaataaacttgtttacttcgatgaaggtattccctgaaccattggcaatacggcgacgacgacttggtgtcaaaagatctggattttcacgttcttcaggtgtcatagatgatacgatggcacgtttgcgagcaatttgtttctcatctactttaacattagccaaggctggattgttagccatacctggcaacatcttgagcaaatcctccattggacccatattttgtacctggtctaattggtcgatgaagtcattgaagtcaaaagtgttttcacgcatcttttcagccaactcaagagattttttctcatcatactcttgagaagctttttcgataagggtaagaaggtcacccatacccaaaatacgacttgacatacggtctgggtggaaagtctcgatatccgtaattttctcaccagtacccgtaaatttgattggcttgcctgtaatctcacgaatagaaagagctgcaccaccacgtgtgtccccatcaatttttgtaagaacaacaccagtgatatctagctgttcgttgaactccttggcaacgttagcagcttcctgaccaatcatgctatccacaaccaagagaatttcgtttggatgagcaaaatccttaatatcatgcaactcttgcatgagagtctcgtcaatctgcaaacgaccagccgtatcaatcaagacatagtcattcttattggcacgcgcttgttccaaaccatttttgacaatctcaactgctggtatctctgttcccatatcaaaaacaggaacattgatttgttgccccaaagttttcaattgatcaatggctgctggacgatagatgtccgccgcaatcatcattggacgggcttcttgttccttgatcaacttattagccaatttaccagcaaaggttgtcttaccagccccttggagaccaaccatcataatgattgttggaatctttggagatttctcaatttcagatgtttcagacccaagaatctctgtcaattcttcattaacaatcttgataatttgttgtgaagcatcaagagtatcaatgatttcgtgacctacagcacgttcacgaacacgtttgataaatgtcttaacgactggtagcgctacgtctgcttcaagaagtgccaaacgaatctctttagtgacttcttgaacttctttctctgaaagttttcctttacgtcttaaatttttgaaaacgccttgcaagcgttccgttaagctttcaaaagccatatatcatttcctctcttactttctgcttgaatctaatctctattatcaatgctgctgagcacagcaatttgttcctggaggtagctatcgtctgggtatttttccatgatatcatcaaaaatttggctacggacgatgtaatctgaatacatatgtaatttcatctcgtaagcttctaaaatcttctcagtacgcttgatgttatcatatactgcctggcgactcacaccaaattcctcggcaatttctgccaaactgtaatcatccgcataatagagctcaatatagttcatctgcttatctgtcaaaagtgcagcatagaactcaaaaagggcattcatgcgattggttttttcaatttccataagctccattttaccataaaatcatggtgttagcacgattcttatgcagaaaaaagcagtgacttctaattgttctccaaataaaattcaaaacggtcaccaacatagtaacttcgtacatattcgaaagcctgaccatcttggaggaaggaaatttgtgtcaaacttaggagagcatcaccagtcttaaccttgaggtgcttggctaaactactattggccaaactagctgaaatggtctgctgacttttcccaatttcatatccattatcggtcagtgtcttgaagaaatgttctgtaatttctgactccttaaaacctcggataattttctcagggatactggcaatctcataggcaactggaagatcatccgcaaagcgaacacgttccatacgaatcacataggactgtggtaggacacctaaattcttgatttcaaattcattgggatgcacacgtttatatgaaataagctcactagacggtttcttgccttgggatttaacaatctctgtgaaactcgtggttccacgcatcttttccttaactcgactgctggccacaaaagtaccactgcctggtttacgttctaaaataccctcgtctactaaaagtgttatggcctgacgcacagtcatacgactcacatcaaaagtgtcgcaaagatcccgctcgctagggagacgttgcccgattttccaagtgccatcatcaacatctgccttaatcttatcatgtatgcgaatatatgctggtagcatctaatacccccttctttacccctattttacaaaaaaactaatagaattgtaaaggtgacgacaagacttacagttcatcgtataaatctaggtgctaagtccataaatttgtgatacaatgattgcataagaaagagtccatgtgtgacgtaaaaagaaagggtaataatgactgacatttctactttgaatgatgtgcagaaaatcattgttctagactatggtagccaatacaatcagctgattgcacgtcgtattcgtgaatttggtgttttctctgaattgaagagccataaaattaccgctgatgaagtccgtgccatcaatcctatcggtatcgtactttctggtggtcctaactctgtttatgccgaagatgcatttggtattgacgaagagattttcgagcttggtatcccaattcttggtatctgttacggaatgcaacttttgacccacaaactcggtggtaaagttgttccagctggtgaagcaggtaaccgtgagtatggccaatcaacacttcgccttcgtacccaatcagaactctttgcaggaactcctgaagaacaagttgttctgatgagccacggtgatgcagttacagaaattccagaaggtttccatcttgttggtgactcagtagattgcccattcgccgcgatggaagataccgagaaaaacttctatggtatccaattccacccagaagttcgtcactctgtatatggtaatgacattttgaaaaacttcgcttttggtatctgtggtgccaaaggtgactggtcaatggctaacttcgtagatatgcaaattgcacaaatccgtgaaacagttggtgaccgtaaagtccttcttggactctcaggtggggttgactcatctgttgttggtgtccttttgcaaaaagctattggtgatcaattgacatgtatcttcgttgaccacggtcttcttcgtaaaggtgaaggtgaccaagttatggagatgcttggaggtaaatttggccttaacattatccgtgttgatgcttctaaacgcttcctagacctcttggctggtgttgatgatcctgagaaaaaacgtaaaatcattggtaacgagtttgtttacgtctttgatgacgaagcaagcaaacttaaaggtgtagacttcctagctcaaggaacgctctatactgatattattgaatcaggtactgagacagctcaaacaatcaaatctcaccacaacgttggtggtcttccagaagacatgcaatttgaattgattgaaccacttaataccctctttaaagatgaagttcgtgcccttggtactgaaatgggaatgcctgatgaagtcgtttggcgtcaacctttcccaggaccaggacttgccatccgtgttatgggtgaaatcactgaagagaaacttgaaaccgttcgtgagtctgatgctatccttcgtgaagaaattgccaaagctggtcttgatcgtgatgtatggcaatacttcactgttaacacaggcgttcgttctgtcggtgttatgggtgatggccgtacttacgactacactatcgctattcgtgctatcacttcaatcgacggtatgacagctaactttgcgaaacttccatgggaagttcttcaaaagatttctgttcgaatcgttaacgaagttgaccacgttaaccgtatcgtctacgatattacaagtaaaccacctgcaacagtagagtgggaataaaatataaacctaatttaaagtgacttgattgatttaacagcattttgatttgttttaaaacgctaaaatctaattaattatatttggttccccaccaaataccccaccagaatttctttctggtggggattttttatatcttatttaaaaaataaaccaataggcaatgatatggggtcagaaaaatttttccttttctgatgtccagtattaactcttacaacatatttagacaatggggaaaatcaaaacactcagattgttatttatttgtaaaaatttcactttaaccatttgctatatttctttcattgacatttagcccataaatttgaaaatcatgataggatccattatagaactcgaattgggaaatttctctttcctttttaaaacctaaacttattggtataaacttacttttaacattatcaacatctatataaatcaatagcttatcaattttaaatttggatggaataaattttattaattcttttaccccttgctttacaaaaccttgattttcatatttttctgatatccaatatccaatttcggcttgatgtttttgtaaatcaatattatgtatatctatcatccctactggtttctgattgacgcaaattgttaacataaataactcattgcgctccattttttcacgtgcatactttataaacgctttttcattttcaagacttttcatttcttccacccaaggaagccacgtagcaagacgttctcgttcagtagaaacaatctcatataacccttcactatggctatcggatatataaaaaagttggcatcgtttcccacgtgatttaaactctatgaatagttccgagtccaagttggtagaatccatttcatactccttgttataaatgataatattctttaactctttatttacgaaatcattatataacttttttactacttttcaaatgaataaaattttgtctatctttttgaggacagtacatattacaacaacaaacgaattaaggtaaaactaaaaggacctagtcctatatagtagagaactaaatccttcacttaaattatttgtctaactttctagtatcagttcaagtttacaccactcgactcttcacatagtcaaaatagcatagatagatgtttgcttacttagtgaaatccaatactttacgtccttgaatttcacctctttccatttgatcaaagacttctaccgctgtatcaacaggaacagtctcaacaaccggtactaccaatccttgtgcaccgaagtcgaaggcttcttctaagtctttacgtgtacctacaagagatccaacaacacggataccatctagaactgttttgacaatggaaagctccatatattcagatgggagaccaaccgcaacgactgttccaccagcacgtacactatcgacagcttgattgaaggcaaccttggaaacagcggttagaacagcactgtgtgtaccaccagttttttcttggatataacccgctacatcttcaacttctttaccgttcacaactaagtcagcaccagattctttagccaaatcaagtttatcttggttgatatcaacggccactactcgtgcattgaaaaccttcttagcatattgaatagccaagttacctagtcctccagcaccataaatagctacccattgacctggttcaactttagcttctttaatagctttatatgttgtaactcccgcacaagtaatagatgaagcttgagctggattaagttcttctggaactttcacagcatagtcagcagtaaccaaagcatagtcactcataccaccatcaacactataaccagcattttttacagaacgacagagtgtttcactaccagttgtacaatattcacagtggccacatccttcgaagagccaagcgattgatacgcggtcaccttttttaagtgtctcaacaccttcaccaacttcttcgacaataccaataccttcgtggcctagtatacgacctggtacttggccaaagtctccatgagctacatgaaggtcagtatggcaaacaccacagtactcaactttaaccaaagcttgaccatgaccaactactgctggtttttcatgatcaacaacttcaacacctgtacttgcttgattaacaacaactgctctcatcttaattaccaccatatgataacttttgacaccttcattatagcacttacagagatgatatcaacgcttacataaagcttttcttagcttgcgaaaactttcttgaaaactctctatacaagtggaattgttactatttctgctgctgatattactttgtttcaatcatttccaagatacctatactgtctcacaagcgtcctggaatcaactaggctgacttcaaaatggaaataatgattgcgtccatctctggcattctctttatttaataaaaaataattcttttgactgatagccatctccctcataatatcatccgtcaaaaaggttaagggaatatccatggcagaataacgataaaagtcttcttcaaattttaaatagctatcagaaaaatagtcaatttgaagtttatcatcataaatttttctcttcctcatctatgttttcaacccccaaactaatttctaatatatcctttgttcgaatacatttatgtcgcttgcaagattttatagtaacttgattaaaatccaagtcaaccacatagccactacatctacagcgcctaccttgatcctttatctggaaacttcccaataattgacctgaataaagctggtttaataaagtaaacttctctaaatcatccaaatgactcctaagattttctttagtcttatcttcatgtagggagcttgtatgttctgataagaaaaagcccatccacttcatcattcccctgtcttgatgttccctagctgattgaaagggaaggtaactacggtctatcattttaagccatctaatcctccagcagagtgcccaccaataagcttacttcgagcaagactcctagatgcctcctgtaaagcagttgctttttgaatggtcgtaaagccaaattcctgtcgaatactatctataactgcctgaagtctttcttctttatcaatgtcatctggattatcaaataaagaaagaatctgaagcctttcatctacaaaatttgcataagagacactgacacttcgaacagcccctccttgatatttcttcctaaagagttcaatgacatggcttattagtactcttgtattattagcaggttcaatcttcatctgtgcttgtagcgaacgcttgccctctaactttgaaaatccaatgctgatggaaacttgacaagctttcttatgggctcgtcttaacctaatagctacctgttctgccatctctcttagaatcaattcaatatcagcttgacgctcatagtctcgtggcaagatttgggaattccctaagccatgtgactttggtttataaggtttatgaacattactctcatcgataccgttggcatgaaaaaaaagatctaaacccacaatacctaactcctttttaagagtatcaggattgctattagcaagttctcgaatagagaaaatccccaacttgtttaaatgcttctccatccgctttccaatcccccaaaaatcggtcatatggggaatattccaaaccttagtctcgacatcttcataggaccagttggctctcatagtagccgtatgtttggcctcattatcaagagctaacttggccaataagggattgctattagacatcccaactgtcgagtaaatacctgtctccctccaaatatctctttgaatacgccctgaaatcatatctaacttatcttttcttgtaactgttctatcgggaataaagtaattcagtgacgacgtgagatcaatgaaaccctcatcaatggaataaggaagaatatcttcaacactggcataattctggaaaatgtgttgaatctggatattcttttttatatagaggtccattctaggaggaacaataaaggtaaccttagcccaagattcgatgtaatctacaaaagctctatccgttggaagtccctgctttttggcattataataatgaaacttacgagaatgaatgtcaaaaggtaagtcgtaagaacgactaacatttgacttgccaaaaacctgcttaaatatgggtgaggaggctagtatcaaaccattagcattttcagccctactcatcacacatagagaagtcttaagaggatgcagtccacgttcaacacactctacactcgcatagaaagatttcatatctacaaaagcaatatcactttgcggttctcttgaataatcaaaatatcccatgcttaccctttcgttagtttataaactaacattagtataaaatataacttgttttatttcaagtattttccacaaaaaaataacaacatcccttctagaatgttgttatccttctattttttccctttaacttggtcggtggcaacatcttcgccaaaccatttgtcagaaatcttttggaattctccatttttataaagggttctaaatccttgattgatttttttaataagtgtcttatctgccttacgagcacctacagcaaagctttcaccctcgtaaccagcaggcataacgttatactgatccagaactcctgatttttctaagtagtaattagcatacacacggtcaatcaataggccgtcaatacgtccactatcaaggtcaatcaaggcctgagtaaaggtcgaatattggactgctttttggttggcgacgatatccttcaaaatcttcggagaagcattgaaagcatcataaccggaagagcccgcttgggcacctaagttcttacctgccattcctgaaacagaatcaattcccgaagactttttggttaccagtacttgttcattgaccatataaggcactgtaaagtctgcagactgcttacgctcatccgtgaccgagtaaccattccaaatgaggtcaattgtcccattcttcagttctgtttctttcatatcccagtcaatagcctgccattcgacatcgataccatacaatttaaaaactgcagtggcaagatcaatatcaaaaccaacatagctaccatccttttcctcatatcccataggaacaaaggtcgcatcaaaaccaattttgattttcttttctttggtataggtttgccactggtctttctgagttgcaaaatgtgagcgcgagctacaagctgatagcgcaaacaaaggcaaaatgacaagacagcctagcaaaatcgtttttactatttttttcatggaaaatcctcactattttggattgatagtgacaatctcatcggcgatgtgctgtgcaaactgcatatcgtgagtgataacgatttgcgtaatcccagtctcacgattctgcaaaatcaatttctcaacttcttgacgcaactcagggtcaagagctgatgttggttcatcatagccgacaattttcggatcaatcatcatagcacgcgcaaatgcaacacgttgtttttgtcccccagaaagagagtaaggataagcatttccgtgagctccaagacctaaacggtcaagtagggcttgagcttttttctgggcatcttccttagacattcccatcgtcttaattggcgaaagcgttaggttgtctaagactgtcaggtgcggaaacagttggaaatcttggaagacaaaacctagcaagttacgactttccatctgatccaagggaatctcttcattttcataaataatttgccctgaatcaatggtttcaagtcctgctagcatacgcaaaagagtcgttttcccaccaccagatggtccgacaatagccaagattttcccttcttctaccgtcaaattatacttatcaaaaattttgtgttgaccaaattgcttggaaatattttttaattctaacataaggtctcctatttgtagtagttaaatttcttttcaatgtgtttagaagccacagtcaccacaccaacaaggatgagataaatagctccggccacaaacatcggtgctagggtcgcatcacggttcgcagcggtacgactctccaaaagaaggtctccaaccccaagcacataaaccaatgatgaatccttaaccaagttaatgatctcgttaaagatacttggcaagacaatcttaaccacctgaggaagaataacatatctgatagtttggaaaggactaagtttaagcattttagctgcttcgtattgtcctttcggaatagccaggattcctccacggaaaatctctgcgaaatatgctgcataattaagcgtgaaagcaagaatcgcagctggcagacggtcaaagacaattcctacgctcggaagaacgtaataaacaaaaatcaattgcaaaaggagtggtgttccacgcataatccaaacataaagggtcaacaaccaatttaaaggtttgaatttaatctgcattaagaaagcaagtacaatccctaatggaatcgacagtacgataacaatgaagaatacttgaagtgtgactaccgcaccgttcaaaagggctggtaatacttccaaaacgtatgacatataaactcctataattatttagtattgttgaatattataccaaatttttaaaaaaaatgatataagattttgaaaatagtaaaaaggagtgcgactagacccatttttcaaaatgagttcatagtcacactcctgagagacttaaatagtctgtcctgagaaacaaacaatacttaagtctagcatctctaaagcttattttagattttcttaacaaattcagatttaagtttcatagcaccaaaaccatcaatcttacaatcaatgttgtggtcaccttcaaccaaacgaatatttttaacacgtgtgccttgtttaatatcttttggcgcacctttaactttcaaatctttgataactgtaacagtgtcaccgtcagcaagacgtgtgccattgctatcaagaaccacaagtccttcttcttctgcaacttcgtttggattccactcataggcacattcaggacatacaagcaagattccatcttcataaacatactctgagttacattttggacaatttggtaatgacataattctctcctaagattgtgatatagatactattctactttagatttcctaattaagcaagggtgaaaacgataaaaacaaacaacatcccttacactgtaagagatgttggtatttttattcaacagtaactgatttagccaagttacgtggtttatcgacgtcgagtccacgatggagtgttgcaaaataagcaatcaattgtgtcggtacaaccattgaaattggtgacaagtaagggtgaacgttattaagaacgatgtcatcaccttctttagcaacattttcctcagcaatagtcaacactttcgcaccacgtgctgctacctcttggatattaccacgagtgtggctagcaagaacagcgtcagacaagagggcaataacaggtgtaccatcttcgatcaaagcgattgttccgtgtttcaactcacctgctgcaaaaccttcacattggatatatgagatttctttcaatttaagactagcttccatagcaacgtagtaatcttgaccacgaccaatatagaaagcgttacgtgtttctgcaaggagagctgccactttctcgtcaatgacttctttttcagagagtgttgattcgatagattgtgctacaagtgacaattcatgtaccaagtcaaaagctttagctttttcattgccattagcctcaccaactgctttagccaagaaggcaagagctgcaatctgagcagtataagctttagtagaagctacggcaatttctgggccagcatgaagaagcattgtatggtcagcttcacgagaaagagtagatcccggaacgtttgtcactgtcaaacttggaatacccaactcgttagctttaacaagaacctgacggctatctgctgtttcacctgattggctaataaaaacaaagagaggtttcttgctaaggagtggcataccataaccccactcagaagaaataccaagctcaactggtgtatctgtcaactcttcgagcatcttcttagaagcaaaaccagcatgatatgatgttcctgccgcaagaatatagatacgatcagcctcttgaacagccttgataatatcagcatctacagtcacttgccccttgtcatctgtgtaggcttggataagcttacgcatcactgttggttgctcatcgatttctttgagcatgtagtaagggtaagtgcctttaccaatatcagataggtcaagttcagctgtatagctatcacgttcttttacattgccatcataatcttgaacttcaacactatcagctttcacgataactaactcttgatcgtgaatttccatgtattgattagtttcgcgaatcatagccatggcatctgagcagaccatgttatagccatcaccaagaccaatcaaaagtggtgatttgttttttgcaacgtaaattgttgaggcatcttcagaatccatgagggcaaaggcatatgatccacggataatgtgaagagctttcttgaatgcttcaagagttgacaaaccatcttcttcaacgaattttccaatcaagtgaactgcaatttcagtatcagtttgacctttgaaatggtgaccagcaaggtattcttccttaatttcaagatagttttcaataacaccattgtgaaccaaaacgaaacgttctgtttctgagcggtgtgggtgagcattgtcctctgttggtttaccgtgagttgcccaacgagtatgtccaataccggctgtgccttctactccttcagttttagcagcaagttccgcaatacggccaacagccttaaccaattgactagatgcatcgcccgctacaaagataccagctgaatcataaccacggtattctagcttttcaagtccttgaatcaagatatcagttgcatttgtgttacctacaacaccaacaattccacacatatttttaataataacctcagatcaaagaggtcatgtctccttcatttaaaattggtatagtcaataagctctttaaaaagcttaacgaggacagtatattgcatatatttgacattgtcaagtataaaaattggtatagtcctaaaaagaccttttacttgcctcttatcctaaggaataatccttaaaatatgctataataaggctatgcgaattcaacaattacattatattatcaaaatcgtcgaaaccggctcaatgaatgaagctgcaaaacaacttttcattacgcaaccaagtctttcaaatgctgttcgtgacttggaaagagaaatgggaattgatatctttatccgtaaccctaagggaatcaccttaaccaaggatggcgttgaatttctctcttatgcccgtcaggtagtggaacaaacgaatctcttggaagaacgctacaagagtcacacagagacacgtgaattgtttagtgtttcctctcaacactacgcttttgttgtcaatgccttcgtctcacttctcaagagagctgatatgacacgttacgagctcttcttacgtgaaacacgtacttacgaaattattgaggacgttaaaaacttccgttcagaaattggtgttctcttccttaacagctataaccgagatgtcttgactaagatgtttgacgacaaccgtctcacatataccagtctcttcaaagctagaccacatatctttgtcagcaagtcaaatcccttggctaagcatgaagttgtctctttagaagatttagaagacttcccataccttagctacgaccaagggattcataattccttctactattctgaagaaattctctctcagattccccataaaaaatccatcgtggtttcagaccgcgcgacactcttcaacctattaatcggtttggatggttataccattgctacaggtattttaaatagtaatttgaatggtgataacattgtctctatcccgcttgatattgatgatgagattgatattgtttacttgaagcatgaaaaggcaaccctctctaaaatgggggaaaaattcctagataacctcgttaaagaagtcacttttgacaactaatagatgttagtccccagcatataatgttggggactttttatcgcccaaactattcaattttggtgcacaaaaaaagagcctttcgactctcatcattatttataatttttatagcttgcccaagcctcatctatagataaggtctcagcatctgtgtatgagcctctatagctattccaaacaaggccacttgttgaagcagttgcttgagtaactggagcttgatcgtaggcagtcaaaccatagtatgcaataatgctatttaatttagaagcgtaaagactgtcagttgcataagttcctgtcagtgcttgagtggcatctgcataactacttgtatttgatttccatgtaccagcataagttgatgacgtcatcaaagcagcataatcggctaaagaatcacttagacttccataagaacggaaaggttcatcaatctcataagtcttccctgtaccatcgtcttcccaagtacgcatggtcacagaattcccgttataagagcccttaatcccgaagaagttgtaataaggagcttgactcaaacctgactgacctgaatttgattccagaatggcttgagcaattagaacagaagcatagatattgtaatcttgaccaatctgtctagcagtctctccgatactatcaataaaagccgtcgtagtttgattgtaggcagcttcagctttagcattaacactgttatcattttttctatctgttgtgaaagctagaaccaaaaaaagtgaacacataaaagctcccacgataaaaatcatatacttctttaaatgacgatacatacaacccttccttcataatattttcgattataatattttaatactattctatcagaaaaactgacaagtcgcaactttcagacctattttccttgataaataaagcaaatgtcatctttacatcatatttataataagctataatatagtcaaattttaaggagatagatgaatgaaaataaaagaattcttactcggattaagtattgcaatacttatatctctcctagcatggttccttggaaacttgttccctatcattggtggacctgtccttggtttatttataggacttctgctaggaataattctaagagattcacagaaacttaaagcaggaatgcaattcacttctaaaaaagtattacaatacgctgttattcttcttggatttggactaaatctttcccaagtctttaaggttggcgtaacatcacttcccattattctagtaactattactacagcactgcttactgcttatgtcgtccatcgcgtgttcaagctagatagtgaaattgctactttagtaggtgttggttcttctatttgtgggggatctgctatcgctgcaactgctcctgtaatcaaggctaaagatgaatctattgcaacagcaatctctgtaattttctttttcaatatcttagcagctctactcttccctcacttgggatcctggttgggacttagtaatcaaggctttgccatatttgctggaacagctgtcaacgatacttcttctgtaactgctacagccagctcttgggatagcttacatggaacatccattctagagcaggcaacaattgttaagttgactcgaacgcttgctatcatccctataactcttgggctttctgtatggcagtcgcgaaaggacaatacaaaggaagcattctcgctagccaaagcagtgcctaactttatcctttggttccttttggcctcactgattacaactgtttcaatgtcactcggtgtaacacctgccgtcttttcacctttaaaagacctttcgaaatttatgattgttatggccatggcagctattggtttccaaacaaatctcaaacaactaatcactaaaggaggctcagcacttctagtgggaggagtttgttggttattaatcagtcttgcttctcttctcatgcaaaagctattaggactttggtaaaagacatctaaaaaactcacaatcttgctaagtttgtgagtttttattatagaatcattttttatactcaaagacataggtttgaataaccttgtccccatcgtttgttactttcaaatcaacattgtaactcttagtttcaccactaatatcctgaaccttataatcaccatctttttttacagaagaggtggtctgccctgaataatgctttacttcaagacttgaagttctgtctagagaaaaaggaatgagcccatttaaagaatatagcccatacaaaataagacataaaaagctcagtgacgcaaggctcaccaaataatatttaacaaaagcccccaatttcaacccctgtttactcacttagttgttatcttcctttaacttaacattatttttattagagtattttcaaattttattttacacacatttgggtattttgtcaaattatttgatatttaaaacagaacctatatttttctatatactaaaagccgttagatgactaacggctattttttatttctgaaataacgtattcaagacggctatagagaccaagtaataagtcgtaacttcgattttcattttctttcaaaacagtgaaaactgttgtactataggtaaattcaaagaagtcatctaattccttgagccagtcatcaataacccctaaattttgatcaatgattgcaaacaaacttggttgataccagattgtaccttcgatataaaggtttttgtcagataatttagatagggatactttcaagtcagcaagctctcgtttagcaagatttggttcaatctttaaatcaaaaagcaagcgtgcatcatgatttagaatatcgagttctgcttgaagcagttgaatataatgtatcgctactaaatactggttcatgggtctctcctggtcatctgaaaatcgtactattattgtaccactaaagaatgaaaaaatgtagtaattatttaattttttacaggatttttttagaaaaaataccatgctttaaatttctatttaaaaataatgacactagcgattttctaagagtttaagaaatgaaagattttttaaaaaaagaaaaacactcacgaatgagcgcaattctagtattaatgactaaccatttcttgggcaatttcaaagccactaagttttccaggatagtaagttggccaattatccatctcttttagaatctcatcttggctactatttccgaagaaaatatggaaatgtgctgaagttgttggatctatttgatgatctgaaaattggacatattggtaaggattgtcagcagcttgactgtcagttgctgtgaagagataacggacaccttttttaccagaagcataagtcaaaatcttataaccatcataacgataagtgtgtgtcacgctacttccatcattttttgtgaaagtcatggtcatctttttaccatcaatagcaattttagaaacatctgtttgatagcccttagtgtagtactctttatactcttgtgcggttttatccttattcaatagagctttgtattcaaatacttgatctaaagtaccatcttggaggtaaggatagaccgattgccattcaccagaccaatcagaaagttccctatctttgacatctttgtcatcaaagtaaccattttggactgttttcttatcatcgcttcctgtttcaggttggatagctttaccttcaacatctgttgttaaacgaaggtttttaagattctcagtcataacactgacataatcttcaccttttttcaactgttccttagttagtgattcaattggatttaaaactgctgtcttaactcctacttcattagctaaggttttggcaacgctacttgaagcattttcctcaaagtagatatagttaatgtcatattctttgacatacttagaaaggctagcgatacgttttgcagatggatcagattcagctgaaacacctgaaattggtacttgtgtcaaaccgtaatctaaagcaaggtaggcaaaagctgagtgctgggtaacaaaacttttctgtttcgcttgacttaaggcttcagtatactccttatccaaagtctttaattttttaaggtatttctcagcattagttgtaaagactgcttttttatctgggtgttgagcaatcaaaccgtccctaatagtttcaactaatttttgagaacgtttaggtgagagccaaacatgaggatcatattcgtggtgatgctcttctccaccgtgatcatgatcttcttcctctattccaggtaagagaaccatgccttgacttgccttaatgatttttgtatttttagtgttgatagacttttcaacttttggaacccaggtttccatattttcatttaggtagacgaaagtgtctgctttttcaatatcagcgacattcttagtagatggttgaaaatcgtgggcttcactaccagcgggaataagataagacacctctccctcatcgccaacaacctgctttgtaaattcataaacagggtaaaagctggtcacaaccttcaagtcgctatttccttttgaaccgtggtgactagtcgtataataaatacctgcaccagcagctaaaacaactgctgctattcctgctaggccaaaaatgcgtttctttttcatgatattcctttcaaaatacttaaccagttaatagtttactggttaagtatatcacacttcatttattttgcaagtactaaaataaaaaaattgaaatatttcgatgaaaaagaattatttgatatactggaaatatcatttggaaagtaggttatacatgtttcgtaaattaaccctatatctttttttattgcttgcatccattggcctgacttatgatacacaatcatacacctcaggtgccttgtctggttcagcatacggtattattggactatcaacactaattgccttatgttatatcctaccaggaatatttctggttcgatacttaggcaagagatggcaggtgaaaccacttgttctcatatttgctctaattggtggagtctttatcacaggatggatagctggttatgccaataccatttctcacgactgggtgactgctcatctttcttcaaagagtttcttctaccgctttgaggatgctcttatggctcccctagttgaagaacccctcaaactagctgcttttctctttgctatctatatggtgccaacaaaaagttacaaggagctcttgcttgtcgctattacggcaggtcttggcttccagattagtgaagacttctcctatattctttcagatttgcctgatggtttttcttatacgatttcgggaatccttggtcgaactattggtgctgtatcgtctcactggctttacacgtccttccttgctatggggctagtccttatatggcgttcacgtcaaaaactcattaattccaagtacagtcttattggtattctttatgcttgtggtgcttttgcgacacactttgcttggaattcacctcttagaaatttagaaagcgatttgccatgggcatcaggccttctcatttcactcaatcttttctttttcattacactttaccaactcctctcgaaactggatgaagaaaacaagtaaggttagactacgaaaaaacctttccataaaattggaaaggtttttttgatgactttaatcactcatagaaaaacgattagtcatcaagttacttgcatcatctaagacttttgccaatagtttatctgtttctgactgaatcttatcactaattttttgattttcagattcaaaatcaatactctcaccatttgctaaagcattgtcgacatgattaatcatagcatggccaagagccatcgttgtttctacataagcatccaaatcagcctcatgctgttggaaatgaggatcacagatagcagcaatcaaacgattactccagtagaaattgcctgtatctactttatcagttgtttgacggaaataagcaggtgttgttccgacctgagtccagaatggcaccattgtaccaaatggcattgatccataggctaaccactgaataccagttgtttctgatggtttgttaggacgcatttgcaagagagctgtttgactagtacggttaataccaattggacggaattggcgttgactcactgcatctccttgaggtccgtaagggtcataaggtgtatcttggtaatgaagactcaaaacgtatttaacatcttcaactgtaattttgcggtatggtttttggcaccatggaataaagaatgattttggatcatagtctttttctgggttcaaaaatttctgcatagcccaggcgcgtggtgtattataatgacgatccttatctcgttggctaccaaaagcataacgtggattaaagtgttcattagaataagtcaaatccaagtgatgtttattaataaaatttcgaatgtctggtgaggcaagatagtcgtctggattttcaaactcatagtgatcgatacctagttggtttggattagtaacataggcatcgtctggaacacgtcttgcaatccaatggtgaccaccaattgtttccaaccaccaaatttcttcagtgtctgaaaaagcaatcccattagactcgtaagttccgtaagtttcaaggagttgtcccaaacgaaggacaccttcacgcgccgtcttgatatatggcaagaccaaagtcaacatatcctcttctccaaaaccatctttaacaagaggatcagcgccgagaacacgcgcattagtcgtgattgtttctgttgcactcatggcaacattagctgagttaataccagcttcaccccaaataccgtctttcccaagcgcatctgggacagaggtataacgtagaggattatctggcaaatcaattgaaaaattgctaagcacagactggtaatgacgctgttggtcttctggggtcacgacgagaaattctttgggcgtaaaaacgcctgattgagaatcctcagtacgtgcaatcatggtagagccgtcatatgaggctttcttacctactaaaatcgttgtacaagccataaaagcttcctttctacttacaaatcgtcggcaatcttattgatttttctgagacgatggttaacaccactcttggtcagaggaggttctatactatctgcgatctgctggatagagtaatctgggttggcaatacgaagttgggcaatttggcgtagctctaccggtaaaatctccaagccaaccgtatccataatcttgataatattattaattgttttcatactagcactaatcgttctagcaatattggctgtttccgcattattggcacgattcagatcatttctggtttctcgcataattttgacctcttcgaaggcatctttagagttcattgcgccgataacaaggagaaaatccataatgtcctcagctttttgaagataggtcacaaacccatttttatgactcaaaaccttagcatcgagcataaattttttcatgagagaagctaaatcctctgcgtggtcttggtaaacggaaaaaatttctaattgataacgtcccttttcaggatcacgtaccgttccggttgccaaaaaagcgcctcgtaaataggatcttccagcttcgtcatcttccattactgatgtttcaatgcctgtttcaaagccaaagaaagaatccgccaattgtaaatcggacaaaatatcattgacatggtcagcgacaaaaaccgtgtaaacacgatttttcttgagattggtcttgttgtgatgtctcaattcaggattactctgataacgactttccattaattggtagatatgtcgcgcaatctttgcattttctgttgagatggaaagagtcaagccttgattagtcaatccaaccgaaccagacatcttaatcaatgctgacaattcagccttgtctttgcttgaagcagcaattatctcttctttaaccttaattgtgaaactcatgacttgttcctcactagatgcatgagctcatccactaccaagtcaccatggtggaaggcaccaccattttcaagtcgcaaaaaattagaagacacaactgttttagcttcacgacgtaacccctcaaaatcatgctcaacctgaacaaggtattcatcaaatttattactagccatgtattccttaggcactttcttaatattaactaagacattgtcaatcacatcagagccaagatgacgattaagaacagccacatggtcggcatctgagaattgttcagtttctccgtactgagtcataatattacaaatgtaagtcacatcagccttggtctcgataagagcctgacgaatctctggtataactaggttgggcaaaatcgacgtataaagagatccaggacccaaaacaatcatatcactattcataatagcatcaacaaccttacgactggccttaggctcttcgtcgttataggtattggtcacataaacgcgttcaatcatgccatcatactgggcaatactactctcccctgctacttcatgaccatcttgaaaaacggcatgaagcgtcaaagctgtctcactagcaggataaatttttcctgtaacgtggaagaacttcgtcagaagctgcatggcattataggtagatccctgcatttctgaaattccagcgatgattaaatttccgagtggatgaccagccaaagcaccatcggttttatcaaaacgatattggaaaactctttcataaagtttaggcatatcactcatagctaccaaaacattacgcaaatcccctggaggtgtcagctgcatgatatcacgcaaatctcccgaagaaccgccatcatcagctacagttaccacagcagtgatatcaacatccttatgacgcaaactacgaagaatgactgggataccagttcccccacctattactgtaattcttggttttttcatgaacgattcaccgtctccttccgtcgatccttatcacgatgggtttcattgactgtccaatcatttttcaaatcttgggccagacgatgtgcaaaggctacactacggtgttgaccacctgtgcagccaacagcaatggtaagaacagacttaccttctttcttgtatccaggcaagattggtttgataagctgtatcaaatgattgtaaaactcttctgattccttatggttcatgacgtaatcaaaaacctctttatccaaacctgtgaggttacgaagtgcaggatcataataaggatttggcaagaaacggacatcaaaaaccagatctgcatccaatggcaatccatatttaaaaccaaaactcaaaacttcaatacggaaagaagattggtcttgttcagatgagaactgttcagaaatagccttacgcaactggcgtggagttaattctgtcgtgtcaaccacgttttgactcaaactcttaagcggagacaaaagctcacgctctagcttgataccatccaaaacacggccatctgccgccaatgggtggctacgacgtgtctctttataacgagaaaccaattcaccatccgtagcatccaagaatagaatcttgaaattaagttcctcattactttccaatttatccagaatatcattaatctcatcgaagaacaagcgactacgcatgtcaacaacaagagcaatcttgtctgtctcttcactatgttttaccaattcgataaccttaggtaccaaagagggtggcatattatcaatggtgaagtatccaatatcctcaaaggattgaattgctacagtcttacctgcaccactcatccctgttacaacaactaaattaatttttttcgttcccatgagactccctttctaatctttcttctttcaagacacgaataacgtctgacatcttctcaacttgttggctaacccccataatcatttctgtctgcaatttttgaattgtcagaagatctgattggtcttgttgaaccaagtggtctattttttcatgcaagagtcggatttcttccttagactgggtattgacgtgatagtcgttacgcgcttgtaaacggtcataatccgatgctcgattctgactcatcataatcaatggtgcctgaacggccgctagagtagacaaggccagattcaacagaataaatggatacttatcaaaggcaatcccaaagggttgaacaacattcagccccatccaaatggccataaaagcaacgaatgacaagataaaagtccaagatccaccaaatcgggccacctcatccgccactttttgaccaaaagtaatcctactatccaattgttcctggatgtcttgatcttcatacaataaactcttggtcacatcgtgaacggtttcccgaacatgttcgtttttctcattagcattagcaataacttcatctagaaaaactaacctataatccaaaaggctgatattactaataaaatcatgtccttgtaaatcagggtaatcttttttcaaaagcacctgcaaacgactatttagacgttcgaaataagagccatcggtttcatcgaaccactctttagagatataatcctgaactctcttaacctgcatattttcgccttctttctaggctctattataccatattgaaagcttaaacgttcaatagataaaggaaaagagtccaagactaacctcagactcctcaattattgggacaattaatttaaactcttcttattggtaatttaaagtccagtagtaagtaccgtcaccagcgacaacacaagctactgctgcttgagtagcatctggactcatgagaagttcacgaataccactactcaaccatttattggctacaactgaaccatcagattcacgacggtaaacaataccatcactgttgtaagtgtgtgaaatatctttggcatgtggaagggttgtgctattgtaaagatcatcagaccatgtaagtgctggcaaaccagcagctgtacgttgagcattgatttcattaaaggcagccttagctgagtcaacttcaacataatcagagttttcagttggttctacatgataaacaaatttaacataaccaaattcaacatcactatattttttgtcgtcaacaccgctcttgagattagctgtaataacatagtcacgtgcccaagcactgcccttagaagcgttgaagttgtcaacatcttcaatttcccaagttacattacaatcccagccagcattatctaagaattttggagcaaaattcttaataacataatctttgaattcatccacattttggaatggaagagcttcaccagctttaccagtaccaactacattttcagaatacaacttaacacttgatgcattgtcatcgtacatgtattcgtcgtttcctgctggtttatggaaatctggatcaagctcagggtcatcattggcagtaccattgtagagtttccatttaccatcaacccatttgtagtaaccatcgataccacgcgcattatcttcatctgtcaatgccacacggtagtaataggtaccgttgtcatctacaaatcgtggatctgaatacatgcgataatctgttggtggcaatgttggttttggcaacttgtcatagtcaatgttggtttcaggtgcatatggtggtttttcaagttcaggagcttctgaacttgtttctgatgtagaacctgtttctgaagtagcaactgagtctgaggtgattactgaagttgaattacctgttgaagcagcatctgaagttgctgatgatgttgaatctacagttgatggtacctctgaagttgcagatgatgttgaatcaactgttgatggtgcttctgaagttgctgatgacgttgaatcaaccatcgatggtgactctgaagttgctgatgatgttgaatctacagttgatggtacctctgaagttgctgatgatgttgaatcaactgttgatggtgcttctgaagttgctgatgatgttgaatcaaccattgatggtgcttctgaagttgctgatgacgttgaatcaaccatcgatggtgactctgaagttgcagacgaagttgaatcaaccattgatggtgcttctgaagttgctgatgacgttgaatcaaccattgatggtgcttccgaagttgttggagcttcagagtctgtgcttgaagccttaacaagtacccacttaccatttgaataatagtaataatcaccattatctttcaaataatagtgagtaccattttcataacggtagtgaggatcatttctcaaaacctcataaccagtcgttggtgtattgttagaaccactattgttgttattatagtcgccaccacgaacccaacgtccgttatagttaacatagtagctaccatcactcaaaatgtagtacaaataaccattgctatagcggtaagtaccagattcgttgtagttgttgtagccaggattatagttattatagccataatcatagttataattatagccatagttatagtttggataataattattgtaaccgtagttatagccataattgtaattatagactggataataaccattatatccgtagttatagccatagtttggataatagttgttataccatgagttataactatagttattagaataaccacgtccataataactatcggcttgtgcatgattgttgccaactacagttggtgctaaaatagctgcccctaggacagcacatgaaaataatcgtaaactctttcccattgtcttttccccttttaaaacaaatataccttttataagcaatcgcttacatttccatttacactttaattgtaagaaataaaacttctattgtcaaattattttaataatagaagtttctcagactaaaccaatagaagactaaaaaagacctaactttctttgtgaaaaacggttaggcggacctcttttagggcttaaaggcaagtgtttaaacaaaaaaagccctctatttgtataaggacttttagcgtaacattaacgattatcaatattttctgggtaaagatcgtgattaaagagacgttgctcggccatcttctcatactttgtttcaggacgaccataattataataagggtcaatcgaaataccaccacgaggtgtaaatttaccccaaacttccaggtaacgagggttcaaaagtttcaccaaatctttaccaatggtattaatacagttttcgtggaaatccccatggttacggtaactaaagaggtaaagctttagagatttagactcaacgcagagctggtctggaatataagaaatatagatacttgcgaaatcaggttggccagtaataggacaaagtgacgtaaattctggacagttaaatttgataaaataatcattatcagtgtgacgattatcaaatgactccaagacttgtggagagtattcgaaaatataaggtgtctccttattaccaaggagagtaaggtttttcatttcttcttgttgtgacatttttattcctttgttgttaatttcctaggcctttcaatggccttattttaatctaagtttctaatgttaatcatttataaagtaaaaatactatcaattctaagcttatagaatgtgaagattagactccgcgctcattatcgtagagtagggtatgaagctgagggagaacacgcacatttccccacgagtcatcagcagctactgtctcccagagctctttgaggcgatctaattgatgttggacgatattaccttcagctttcggttctggattaccagctgaaagaaacatgacatctggctgataacgttcctgaatcattttagcaaaggctaaatcatcatcgtcaaaaacaggaaccttgaaggtaactttatcaggatcaagttgtgaaacaataaagtcaagggtttccatattgacttccatcttggatgatggtggtttaggacttaaggttacttgatcaatatccttgagccactcctgccagcgagaaccctgagtttcaacggccaaagtcactcctctagccttgagttttgaaacgagttcagccatatttgccgctaaaagagctgggttccctccagaaagagtaacatagtcgtaagttcctagcgcatccaaagcttcaataacttcatcagctgtcatacgcgttggcttctctgacccgtcccaagtgaaagcagaatcacaccaatcacaatggtaatcacatcctgctgtccttacaaacatggtcttttgaccgatagctcgcccttccccttgaaaggtcggtccaaaaatttcaagcacaggtagtttgagtacacgttctctagtcatccaaccactcccgtctaaactctgcaaaggctgttggtgtttcataaagacgcacatattccaaacgaagtcctctctcctcaggcagatgttgactcgttatctggaaaatccagaaaaccatattttccgcagttgtgttcatataaggcaaagtctcattgagataacggtgatctaactgtggttccaaatggtccttataaatgctctttagatcaccaaaatcgaaggtcatgccacgctcatccaagtatccacttactgcaatctgaagatggtaggtatgaccatgaagtgatttgcatttgccttcataattaaagagatggtgggcagcatcaaaagtaaactctttagaaaccattgtacggtgaggattgtaaaccaaggactcacctgtttcttttttgatttctttcggtgcaaagaacattaagcttctcctctttccgctagatatttttcaaggcctttttgacgcaagtgacaggcagggcattccccacaaccagttccaataataccgttatagcaagttagcgttttttcacgaacatagtcaaaagctcctagttggtcagccaaagcccaagtctcagccttatctaaccacatgagaggggtttggataacgaaatcataggccatggctagattaagtgtaacattaagcgatttgacaaaaacatcacgacagtctggataaccagaaaagtctgtctcacaaacacccgtaacaatatcagtaataccacgttgcttagctagaacagctgcaaaagaaaggaaaagatgattacgcccgtccacaaaagtattaggaacttcaccttcttctgcctcaatctcaatatcagatgttaaggcattttcagtgatttgaccaagcaaagacatgtccaaaacatggtgtttaagctcttgttcttgcgcaatctctttagctacttcaatttccaagctatgacgttggccataagcaaaagtaactaattcaactgtttcataatgttttagagcccaaaataggcaagtagtagaatcttgaccgccactaaagacgaccaaagctgattgacgtttcataatattcctcttaattcgtgatgtctgagacacataaaaaggccccttgggggagccaaaaaaacgccagtaatggttttttttagcgatggtgtctcccaaacatcgaaaatgatttatctttaatagtctatcatagttgagaaaaaaagaaaagagccaaggctctcttcattaatcaatctcagcaataacttcgatttcgattttaacatcttttggcaagcgtgccacttctaccgcagaacgtgctgggaaatcagatgtaaaggcagttgcatacacttcgttaaatggaacgaaatcgttaatgtcacttaggaagcaagttgttttaataacgtgatcaaagtctgtacctgcttctgccaaaatagcaccaacatttttaagaacttgttctgtttgttcttgaattgtttcaccaatgatttcacctgtttctggtgacaatggcacttgaccagaagcaaacaatagattgcctacaattttaccttggacataaggtccgattgctgctggtgctttatcagtatgaatagtttttgccatgatagttctcctttgactaatatgttgctattataacaaaatattctgaaaattgaaacatataattccaaaaagaaaagaatcagctctaggctaatccttctcctactatttcagatactttttgacatagctatagtagtctggtttttcttttttattaagtgcaaagagcatttgacccttaatgggttctttctcatcatttggttgtagaaaaagagcaacctctttggatttagttgggaaaaatactgtataagacgtttcttttccctgatcttttacttttagcgaataataggtaaagtcatctttagacttgggaccatccactgtatagttataatcctgctcaccaatcttgaccttatctttcttgaagacaatcgtataatccttctttaaggcatcttgtgcctgccattcaccctctagtgagggagcagacttgctacaagctaccatcgaaaccatacaaagtaaggccaaaagaccaagtaaccatcttttcatacttttgcactcctaaagaattttacttatggtttgatacggtgcaacatacgtgggaatggaatagcttcacggatgtgttttgttccagctacgaaagtaaccatacgttcaataccgataccaaaaccaccgtgtggtactgaaccatatttacgaaggtcaaggtagaattcgtattctgaacggtccattccgagttcatccattttagctacaagagcatcgtagtcatcttcacgcattgaaccaccgatgatttcaccataaccttctggagccaaaaggtctgcacaaagaacgcgctcaggattaccaggaactggtttcatgtagaaggccttgaagcttgctggataattaacaacgaatgttggaacaccaaaatagtttgaaatccaagtttcgtgtggtgaaccaaaatcatctccatgttcgaggtgctcgtaatcagtatcttcatcattttcatgcgcttgaagaaggtcgatagcttcatcataagacacacgcttgaatggctcagcaatgtatttcttaagaagatccacatcacgttcaaggatttcaagagcttgtggcgcacgatcaataacaccttgaataagagccttaacataagcttcttgcaaatcaagtgactcatcatgtgacaagaatgaatactcagcatccatcatccagaactcagtcaagtgacggcgtgtttttgatttttcggcacggaaaacaggaccgaagtcaaagacacgaccaagagccatagcaccagcttcaaggtaaagctgaccagattggcttaggtaagcaggtgtaccaaagtaatccgtttcaaacaattctgttgaatcttcagctgcatttcctgacaaaattggactatcaaatttgatgaaaccatttttatcaaagaattcgtatgttgcgtaaataatcgcattacgaatttgttggacagccatttgtttacgtgaacgcaaccaaaggtgacgattatccatcaagaagtcagttccgtgttcttttggtgtgattggataatcatgtgattcaccgatgacttctactgctgtcacatccaactcgtaaccaaattttgaacgttcgtcttctttgaccacaccagtcacataaactgatgtttcttggctaaggcgtttaacagtatcaaatttttcagtaccttcttcttcaccgtatttttcgatgaagttaggtttgaaagctaccgcttggaagaaggcagttccatcacgcaattgaagaaaggccaatttccctttacctgatttgttagctacccatgcaccgatagtgatttcttcgcccacgtgtttaggcacatcaataattgaaactaattgtttagacatgtaattacttctcttttcttttgatctatattaattctatttttccataaaggctttgattcggcggactgcttctttcaaagtatccaagtctgttgcatagctaagtcgaatattttcaggcgcgccgaatcctgcacctgttaccaaagcgacttcagcctcctcaagaatagcgtttgtaaaatcattaacatttgtgtagcctttgatttccatcgcttttttaacattagggaagaggtaaaaggcaccttgaggtttgatgacttcaaagccaggcacttcagctaggagtggataaatcgtattcaaacgttcctcaaaggcctgacgcatttcttcgatagaagattgatcacctgttaaggcttcaatagcagcatattgagaaactgctgtaagatttgatgtcgtttgactgataatcttagccatacctgaaataatttctgtatctccgacagcaaaaccaacacgccaacctgtcatagcataggtcttggaaacaccattaatcacaattgtttgcttacgaatggcatctgaaagacttgaaattggagtaaaggtattgccattatagaccaaacggccatagatatcatctgctaaaatcaaaatatcgtgctcaaccgcccagtcaccgattgcttgcaattcttccttgcagtaaatcattcctgttggatttgatggagaattaagcaagacaactttagttttttcagtgcgagcagcttcaagttgttcaactgttgctttaaagtgattagcttcagtcgtttggaaagtgactggaacaccttcaaccattttaacttggtctacgtaagaaacccagcaaggtgttggaataatgacttcatcaccaggattgatgaccgtagcaaagaaagcatataagataaacttcgcaccagtgccgacaacaacctcatttggttttacagcatagccatagaagttttccatgtaagtgctaatcgcatccttaagttctggtagtccagaagctacggtatagaaacttgccttaccattttcaatagaggcaatggcagcatcttgaatattcttaggtgttacaaaatctggttcaccaagtgtcaaactcaagatatcacgtccttgagctttaagagctttagcacgcgcactggcagctaaagtaacactttcttccatttgtaatacacgatttgataattttgtcatttcattatagtccttccactttaataacctgacctgagataaaatcaaccagataatactgggttcctgacttcacttcccaaataggagttttgccatactttcctaggtggacataggatatatccttagcaccataggctttagcagctttcttagccactgacttactaataccatccgattgcttgtagatatcaacctcacctgaatcatgactcacgataacagctagtttctcaccttgaccagactttccaagaagtccgtagtaggttgcctcaccatggtagatatcaaattcagtaacagtcttaatatctgctttgctctctgctatggcaataaccttcttttcagcgtctacataaggcttagtcgctacaataagaatagcagtcaaagaagcaattaaggtcacaacgattacaattattccaaaaatgaactgttgctttttggtccagggtgaacgttgtttacgcataatgcctcctaaaaaagtttctgaatttattatatcagaaaatgataaatctttacatagcaatatagctagtattgagcaattaagtctatcttttttataagtcagtaaaatttataaaacctaagtaatcttagaaaaggttggttttaaaaagttaactttctttttctaagaaatcctgaatatcctctttgacttcctcgaacttagcgtgcttaagcgcaacttcttgtgtcacttcttttagaaatagttttccataactcttaacgagcgggcgattatccataagaagaatagccgagcgctgttctggacgtctttgagcacgtccaatagcttgtttaaaacgtaaaaccgtcatgggaagactgtaactatcaaaggtgctctttccttgcttagaaaaccaagattcaatcttttgatagaatggatccttaggattgtcaaacggcagacgtgcaataacctcaattaccctatcttgttgagcaaagtccacaccttcccagaacgaccccatacccagaaggagattggtctcacctctatcaaaacgttttttgacattaaaagcagtcccatttttctcttgagttaggtgacgaacttccctatgatccaataaatctgaaacagccatcatactctttcgagatgtaaatagtactaaaattggatattccattccagatagcttctggagacgctttgcaagagcaacttcatactcttcctcagaagcaataccaatcataggcatgctttgatcaatccaaatagcttgattgggtaaagtatccattgggaggctaaccttgcgtacttgatctaagcccaacaaatcagccacatctacatcaggtcccacatcaatagttgctgaaacaattatcactttttgggcacttggtagataagctgaaagttctaagagctcttggcgtgatgcctttaaataagtcacacgatgttcctgataatagtctgtttcaagccagaaatggctgtaaaggggtgtcttcaagggagacaacatctccatcaaatcactttcaccctccagttcagaaatggtttgtagcaaacgatctaattgctggcgattatactgcttctgaggaaattgttgatgttcttggattagatggctaacttcaaactgcagattttcgagcaagcgttgttgaagcaagctttgactaccactatcaagaattcgatgaatatgttgcaacaggacagtaagattgacttgataacgtgaaaattgttccaaagccagaaccatcttttgtccctcatcaatcacaagagtctttcctcgaacaaaatcatgatcatcttccatacgtgtcaaaagataagcatgattggtcacaactacccttgcttcttgggctttttgataggactgttgccagaaatcatattcagtaaaaagactgtcagcttttagcttaccatcgtgcttaatctcatcgaaataagccatatagcgctgcttttgtctgatttcgtcaagatcccctgtctctgtttcagtcaaccaaaccaagagttgcattttgtaacgattaatcaaacggttactatcctgacgaagtaaggtctggtagaatgcatctaatttgatataattctgaggtcctttgagactatgaaagttaatattaaagacatccgataaggctttagcttcctgattcataatctgattttgaaggagcttggtcggaacagccactaccactttatctacatcagattgcgccaacaaaggaagcaaatagccataggtttttccgattccagtctgagcctgaatcatggaaatatcagtattatcaagctcccttcttactgcctcagcaaactctctttgtttaggtcttgattccaaatctaagagagcaatattggtatcaaaatcttgagacagttttcgttctgccttataagtcaaaggtctacgaagaacaattccagattcttcaagcgtgacatattcttttgatagacctaaattttgacctcttatagcatcacgaataaccaactcagtttcaaaaagaagattatctgaaaaggtcaaaagcatctcaattgtctgtctaggtaagctagcaatcttatccatcaaatgaaacaaaagctgtccggtcgctctcgcatcttcaatagcggtatgggcctgagctaggtcaagattaagaaccttggataaatgagatagcttatattgttctaacgtcggataaaagacctgagccaattcgacagtatccacacgaggagtccttagttcgaagccctccatgaaaagagcctctgcaagcaaattggcatcaaatttaacattatgggcaacaaaaatacagtcctcaatcagttcaaaaatggttctagcaatttctgagaaatctggggcttgagccaactgctgatcggtaatccctgttaaatgaataatatgatcatcgagttcttggtgggggttaacatcactcgcaaattcgtcaatcacctgaccattttgcataatgacaattcccacctgtataatactagccgttgacgaagcggaggtagcttccaaatcaacaatggcatatttattcgtgtttttttcactcatagtgaccttattatagcatatccaaagcatcaaaaaaagataaagccttcattctgagattggaaaaagcctcgaattcgtgctacactagaactatgaaaattaaacgaattttaaatcctgttgctcaggaaaatacctatattttagaaaacgatacagcctgtctagtcattgatccaggaagtgatacttccgctatcttagctgaacttaaagcaatcgacaaaccagttgctgctatccttttgacacatacacactacgatcacattatgagtgttgaggcagtccgtcaagcttataatcaccctcctgtttatgttgcagaggctgaaaaagactggttgatgaatcctattgataatttatcgggacttccacgtcatgatgacatggaagatgtcatcgtcaatcctgcagacttctattttgattttactacaacatataatattagtaattttcaatttaaagttgttccaaccccaggacattctatcggtggcatttctttgattttcgatgaagaagaaatcgtcttttctggtgatgccctctttaaagaaacaattggacgctgggaccttccaacagggaaccacgaacaattactcactagtattaaagaacaactctttatacttcctaaccactacagagttttcccaggtcatggatgggacactactataggccacgaaaaaaactttaacccacatttttcataagaataaaagctcagcaaactataaagctgggctttttacatgcataaaaaagaaggtctaaagaccttcttacttgaaatactagattgtatttatttagatttgatatagttaacaccatcagcttttggtgctactgctttaccaaagaatgcagccaagacaataattgtcaagacatatggtgcaatttgcaagtagacgtttggtacatgtgaaataagcggaagttgtttcccgataattgccaatgattgtgacaaaccgaagaataaacttgagagcatagctccaactggattccaacgaccaaaaatcatagcagccaaggcgatgaaaccaggacctgcaatcgtcgtaatagcaaagttgttagagatggattgagcataaactgcaccaccaacaccaccaaggaatcctgaaatcatgacaccatagtagcgcatacggtaaacattaataccaagtgtatccgctgcctgtgggtgctcacctactgagcgaagacgcaaaccaaagcgagtcttgaagataacccaccaagacacaactgaaaccaaaatcgctacatatgcaatcaaggaaacgttcgtaaagaagactttacccaagactggaatgtggctcaaaattggaaatgatacagttttaaagttatggctaatagctggtgtttggccggcaccaaagataacacgtgtcagaaagactgctaaagatggagcaatcaagttcaataccgtaccagagacaacatgatccgcacggaaattaatggtcgcaaccgcgtggagcaatgagtaaacaagaccaataagacctgctacaattgcggcaatccaaggagttgcatcaccaaaactatctgcaaaattcaagttaaagagaacacctgcgaaggctccaataaccatgattccctcaagaccgacatttacgataccgcctcgttcagagaaagtaccaccgatacttgtgaaaatcaatggtgctgagtatttcagcatagaggcaacaatcaaggctaaaattgtaatgaagtccatattagttttgtcctcctttagctttcactgacttttgacgagggcgaacccaatatctaataatatagttagcaccgacaaagaagataatcaaagcagatacaacgtcgataacttcaggaggcacaccaatcataccactcttacctacagacaagacaccataaagaagggcagcaaacggaataccaataggtgaattagtagccaaaagagcaaccgccataccgttccaaccaattgccaatgaagagttttgaacaaaggcattttggaaggtaccaagtccttctactgttcctccaagtccacaaagggcacctgaaataatcatagacatgataataacacgttttgatgaaatccctgcatattcagatgcatgagggttaagacctacagatgtaatttcaaaaccagttgttgttttcttgagcatgaaccaaacaaggaaaactgctgcaagagcaaggaagaaaccaatattaaaacgtgagccaccggttagagaggataagaattctgtttgatagcttgcagaggctacgaccttattagatgcttctgatgaacgtaacatgtcggctgtaaaaccaaatcgaacaatattgtttgctacatacaaaatgatgtagttcatcatgatggtaacaatgacctcactagttcccaagtaagcacgaagaatacccggaattgcaccagcgataccaccagctactagaccgatgattactgtacagaaaactgaaactacttttggtaattctggaaatgataatgcaaaccatacagccgaagtccaacctgctaaagcctgaccaggcaaaccaacgttaaagaaaccagctttagatgctacagaaaatccgagtgcgataagaatcaagggactcatggcacgaagaatttcaccaatatttttcaaagaaccgaaggctgtactgaagagatcatagtaagcccagaatggatcgtaaccaaagattaacatcaatacagccccgatcaacattcccaagaggacagcaatcaaaggaactgcccaattttgtgttttcttagacatttgcttcctccttattcaattgtccaccagccattaggataccaagatcttgcttattcgtttcagcaggatctaggataccttgaattgcaccaccgtagataactgcaattctgtctgacatatcaagaatttcatccaattcaaagctgactacaataacagccttacctttatcacgctcagcgataatacgtttacgaatgtattcaatggcacctacgtcaagaccacgagttggttgacttacaataagaagctctgggtcacggtcaatctcacgggcgataacagctttttgttggttaccaccagacaagtcaccaccagcaatcaactctccagcaccacgaacgtcaaattcttccatcaattctcgagctttagcattgataacattatagttcaagataccatttttcgaatttggctccttgtagtaggtttgaagggcaatattttcagctactgtcatttcaagaaccataccgtcacggtgacggtcttcaggaatatgaccaacactcatctctgtaatctgacgagttgtcttatgaataatagattcacccttgatggtaatgtcaccagacttaactttacgtagtccagtaatcgcttgaacaagctctgtttgaccgttaccatcaataccggcaataccgatgatttcacccgcacgaacatctaaagataagttcttaacggcaggaacaccacggttctcattaaccaccaaatctttaatagaaagaacaacttcttttggatttgaaggaattttttctgttttaaaggagacatgacgaccaaccatcatttcggccaagtcagcatttgttgatccttcaattgtcactgtatcaattgatttaccacgacggataactgtgacacggtcagaaaccgcacgaatctcatccaatttatgggtgataaggataattgacttgccttctttgaccaaggttttcatgatgtttagaagttcagtaatttcagacggagtcaataccgcagtcggttcatcgaaaatcaaaatatcagcaccacgatacagagtcttaaggatttcaacacgctgttgagcaccaacagaaatatctgccaccttagctgttggatctaccgcaagaccatatctttcagagagctcagtaatttccttaatagccttcttcatatcaaggacaccaccagctttggttacctcactacccaggatgatattttcagcaactgtaaaagcttcaaccaacataaagtgttggtgaaccatcccaatccccagtttcgttgctttagatggtgaatcaatcgtcacctcttgtcctttaaccttaatggtaccgctcgtaggttgcaaaagacctgaaagcatattcattaaagttgacttacctgcaccattttcaccgaggagggcatggatctctccttgtctcacatcaagattgatatggtcatttgccacgaattcaccaaattttttggtaatattgtgcatctcaatgacatttggcttcgtcatacaatctccttccaagaataatttttatttcagcaaaggggatcattaactgcttccctttgctgagacaaaaatttgtctcagtctaagttctataaagacttatacttaactattatttgctaagaccatcagttggtttcaattcaccatttttgatttgttctttagctttttctactgcatctttgatatctgaaggaagattagacgttacaatgtcaacaccaccgtctttgataccgtaagtcttagttttaccaccttcgaatttatcgcctttgacttgtccgttagcaatatctttaacaactgtaccaacttgtttgattgttgaagtcaaaacaaagttagattttttcttgtctgaagatgtatagttaccttctgcattttggtcacggtcaacaccgattacccaaactttcttatcgctgtcagcatcaagtttttcgttaacttctttagctgctgtgaagacaccagtaccagtaccaccagctgcttgatagattacgtcaacgcctgaagcgtacatagttgaagcaattgttgtacctttagcagcgtctgagaatgattcagcatattgaacttgtacatcgatgtctggttttacagatttagcacctgctgtgaaaccagcttcaaaacgtgtaattgtatctgatgtttgaccaccaatgaaaccaactttatttgtttttgattgcattgctgctgcgatacctgcaaggtaagcaccttcgttatcagcaaacaaaacgctctcaacattcttttggtctttgatgacatcatcaatgattacgtagttaacatcttcatgttccttagcagcatctgaaacagcatcatgaagggcaaaaccaacaccaaagatgaggttgtaaccttggctttgagcagctgacatattgtttgcaaagtcagactctgagtttgattggaagtaagtaaagccagaatcttttttaagtttgttagctttaccccactcttggagtccttcccatgctgattggttaaatgatttatcatctaccccaccagtatctgtaacgatagcagctttaactttagaatcagctgatgatccaccgcgtccgccacgagcacatgctgcaagaccaagtgctgctacagcaacaaggccaagaccgataattttcttgttcaatttcatcttgaacactcctcctataacttgcaagaaaacttgcttaataaagaataaaacaactagactattgtaagtctgtaaaagagtatggtaacaactctccgactgtcatctcgactgtcgatttatcttcagcgataagaatcactttagaatcggatttaaaaaactcagccatcacttggcgacatgcaccgcatggtgatataggctctttggtatcaccgtaaacagcgagacactcaaaatcacggtgtccttcagataccgctttaaaaatagccgttctttctgcacaattggtcaatccaaaagaggcattttctatattgcagccttgaaagatttctccattttttgtaatcaaagccgcaccaactctaaacttagagtagggaacataggcattttctgctgccaatcgagctgcttctatcactttctctttgttagtaactgtcatggctttattgacctttcataatggccactcctgacgaagtaccaatacgggttgcaccagctttgataaaggctttagccgcctcaagtgtacgtgctccaccagatgccttgactcccataataggaccaacagcttctcgcataagttcaatatcttcaatggtagcaccaccagtagaaaaccctgtagatgtcttcacaaaatctgcacctgccagttttgctaattggcaagcttcgaccttttcttcatcagtcaatagacaagtttcaataataaccttcacaagttttcttccactagcttcaacaacagctttaatatcgtcttcaactaatttaagatttctagatttaagagcaccgatattgattaccatatcaatttcatccgccccattggcaatagcatccttggcttcaaaagccttaactgcagaagtcgatgctcccaaaggaaaaccgataaccgtacaaactttaacagaactatcttttagcaattcagctgccgttttgacccaagttggattaacacagacgctggcaaactcatacttcttagcctcatcaattaaggaaagaatctgttctttattagcatcagcttttagtaaggtatggtcaatatagctattaacagacataaacaaactccttgattaggattaaattaagtgttagcgaattatttttaatatttctgtcgtttctttacattcactacccataataacatttttttcgaattcagtcagcattttttcagataaaatttcttggctatagaccttggcaataaggtctccctgagtcacagaatcgccaactttcttttcaaatacaattcctgtttcataattaagactatctgacttcgtagctcgacctgctcctaattgcatagcaaattttccaaatgccattgcaggtaactctttaatgtaacctgtttcatgagcatgaatatctgtcacgacaggagcactgctatgacgataaagatcagtcaaatcaccaccttgagcttgaatgagttcttcaaacttagcaagggcttttccacccactaagtgctgacgaatctcttcctgactagcttcaacctgagccaaatctaatagaatctcagccaactcacagataaagtcagtgatatcttcacgtcccttaccttgcataatttcaatagcctctgtgatttctaaacggttaccaatagccttacctagtggctggctcatatctgtaataactgcaatcgtttcacgattgacctcatgacctagtgcaaccatggtttcagacaacttctcagcgtcagacatatttttcataaaagcgccttgaccaacagtaacatccagcaaaatcttatccgcacctgctgcaatttttttagacatgacagagcttgcaattagaggaatagaatctactgttgcagtcacatcacgcaaggcataaagaagtttatcagccttaaccaaatgctcagactgaccaataagggaaatcccaatgtctttaacttgctgaatgaattcttccttactacgctcaacctgatagcctttgatagactctaatttgtcaatcgttccacctgtgtgtccgagaccacgaccactcatcttagccactggaacaccaaagctagctacaagcggcatcagaatgatggttaccttatcaccaacgcctccggtcgaatgtttatctaccttaacacctggaatttctgacaaatcatattgttcacctgaagcaaccatatcagtggtcaaatcatggatttcacgaatagacataccttgataataaatcgccatcgccagagcagctatctgatagtcaggtatttccccagacacatagccattaatgagatatgaaatttccgctgtgcttaactccccaccatctcttttcttttcaattaaatcaactgttctcatattttctcacttctaaggatataatatcctttatcctttttaacgacttcagcattaccaaacacatcctccatcttagccttagctgacggagcaccttgttttttctgaataacaatagttaggttaccaccttgattaagataatcatatgcctcctcgataacttgatgaaccaccttcttgcccgcacggataggtggattagaaataatatagtcaaaacttcctgtaacattttcatagatatttgattggaagatagtagcttcaaccttgtttcgttgagcattttgtttagctaaatcaattgccctactattaatgtcaatcattgtcgctttgactccttgaaccttggctaaactgataccaagaggaccatagccacagcccacatctaaaagcgttttgccagcttccaaatctaatgcactcaaaagcacttgacttccaaaatcaatcatttttttagagaaaaccccagcatccgtataaaactgaaaactttctcctaataaatttacctttaaatcgtgaatatcgtgagccgcatctggcgtctcagcataatacatttttgacattattttttccttctagatagtactttttctttatcgtatcataaataccaaagtaaggctagtaatatgacaaggcttacattcaggctttttttctgctataatgttagctatgttaaatgaatttatcaatttcgaaacgatatcacgcaaggaatggcaacgccttcataaagaggacaatgccccattgactgcagaagaactggattccattcgcagccttaatgataagattgatgtgcaagaagttagtgacatttatcttcctcttattaatctcattcgtatctatcagaaaactgccaatgatctgaccttttctaaaagtatatttttacaaaaatcacagactaaccgtccatttattattggggtatctggttcagttgctgttggcaaatccactaccagtcgtttgcttcaactcttgttgcagcgtacctttccccaatccaatgttgaacttgtgacaactgatggatttctctatcctaaccaagttttgaaagaaaaagacatccttaaccgtaagggtttccctgaatcctacgatatgccactccttctcaattttttagatactataaaaaatggtggtgatgtcaatattcctgtttactctcatgaaatttatgatattgtaccaggacttacccaagaaatcagacagcctaattttttaattgtcgaagggattaatgttttccagaaccctattaaccaacggctctacatgagtgactatttcgatttttctctctacattgacgctgaagttaataatattgaatcctggtatctcgaacgtttccaaactcttcttgagcttgccaaaaaagatgaaaacaactactaccatcgtttcactaaatttagtaagggtgaagctttatctttagcacaaaaaacctggcgtgatatcaatttagttaacctggaaaattatatcgaacctacacgaagccgagccgaactgattcttcataagggagacaatcataaaatcgacttcatccacttaaaaaaatagaaaaagcttgccaaggggcctaaaataacgtataatgacatagttagataaattttggaggtgaaaacattggcaaatattaaatcagctatcaaacgcgctgaacttaacgttaaacaaaacgaaaaaaactcagctcaaaaatcagctttgcgtactgctattaaagcattcaacgctaacccaactgaagaagcttaccgtgctgcatcagctagcatcgataaagccgcttctaaaggtttgattcataaaaacaaagcaagccgcgataaatcacgtcttgcagctaaattggctaactaattgaaagctccatttaggagtttttttattacctaaaaaacctgctagcgtatcgtctagcaggttttctttgttaattaaactccggtgattttaacttcaaaaatcgttccctttggttgattatctttaacaacaattgttcctttaagggctataacaatttgttgcgctagggataagccaagtccaaacccacctttttgtctggttctagccttatctacgcgataaaatcgatcaaagattttcttcttatcactatctgatattccaggaccattatcagctacagaaatataaagatggcgatcgttagtgcggacagtaaaggtaacatgtccgtcatcttccgtatatttaatagcattatcaaataagatggtcattaactgtttcaataacgttttatcagtctggattggacgaccaacttggttttgagacgtgaaacctttctcattttcttctgcaatcatggcatagttggtaaatactgtatcaaagaaagcaggttctaaggtttcgatttctggtttaataccatcgtcacgacgagccaagttcaagagattagtcgtcaaaagacgcatattacgaacttcatcaagacttgatgcaatattctctgaattatctaaaatagtactctcaggcttacggaaaagaacctctaacctgttttgaatcacagcaagcggtgtccgtaactcatgactagcattttcaacaaaagccttctgcttctccaagctttcctggataggacgtcttgaccacttagccaaatacatactagccgcaacagataagagccagaagaaactcatcatgatgacaatgagcttaacataacgttcagtagcttcttccaattgagttgtattaatcgcaataacaaggtacttagcatcaggatagaggctattgtctactttctcagtgatcagacgatacttttccgtttgatcgaaataattctgagcacttcccttgctgataacatcaatgttatttttatctattggtaaattggataagcttgaaaatttatcaacgacattgaggacttttccattcttatcaagtaccaagacactagtatttgccgcaacagataaatcgtgaggggcatcttcaatttttgatttcttcttaggttctttcttagagtcactcgagtcagatgtttcagttgtcgcccctttagtatcataagcctggtaaatggtcgtcgtattattttgatctacctcagaagtcagaaaaagttcccgttttagcatttccatttctaaataagaattggtcttagtggctgccattttcagactagagtccacattggaataaacgccgtaactcagaatctgtaaaatcatgacagtcatgataaggaaaataccagaaaaagtggcaaagaaatgaatgaacgacttaaatccgtctgacttgattctcctaaagagataattgaaaaatttagtcagcatgcttcaaaatataccccacacttctcaaggtttggaggttggcagcaaagtctgttcctttaagtttcttacgaattttagaaacataaacctcgacaactgataccgtggtatcactatcaaatccccaaagacggtcaaaaatttgtgacttaggcaagatgacattttgattttgtaagaagtaaactaataaatcaaactctttaccaagaagttctacttctttatcccccacaaaggttgaatttgtagcaagattgacacgaacatcaccaaaagaaagtgtgttttggtcaaatttaccagagcgtttcaaaagtgcttgaatacgcatcttcaactcttctaaatagaaaggcttagttaggtagtcatctgcaccaagttcaaagccgtggcctttatcatctagactttccttagccgtcatgataagtacaggagttgttacacctttttcacgtaattctctaagaaccgtgaaaccatctttttcaggcaacataaggtctaaaagaatcaaatcataaacgccactttcagcttcgtaaaggccttcatcaccatcaaagacttgcatcacatcagcaaagtcatctaaaaaatcaaaaactgagttcgacaaactcaaatcatcttctactagtagtattttaatcatagttatcccccttgttaggtgtcaaagatacaaataacactttgactaagttttatcattatatctaaaatagacgtaatcatctagtgctttgatcttcttttatttagctttagtctactaaactttccttaagcttttcataactcaaacaaaaaaacagcaccaataggtactgttttatatcgatatttctttagaacaaaccaacagctgttccatcttcagctacgtccatcttgagggctgctggtgcttttggaagaccaggcattgtcatgacgtcacctgtaagagctacgataaatccagcacctgttttaggaacaaattcacggatagtgatatcaaaaccttctggtgctccaagtaagaattggttatctgagaagctatattgtgttttagccatacatactggcaatttatcccaaccgaattctgcaaattgtttgagttggttcttagcttttttctcgaagacaactgatttaccaccatagatttcagtaacaatcttagtgattttttcttccaagctatcatcatcagaataaagacgtttatagtcggcattaccattttcaacagcatcaactactgcgttggcaaggtcaataccaccatcagcaccattagcccaaacgctagccaattcaacaggaacatcgatttctgcacaaagttctttaagggctgcaatttcagcttctgtatcagcaacaaactcgttaatagcaacgactgctggaagaccaaatttacgaacgttttctacatgacgtttcaagtttgcgaagccatcacgaacggcctgaacattttcttcagagaggtcagttttggtaaccccaccgtgcattttaagggcacgaagtgtcgcaacaataacaacagcatcaggagttgttgggaggtttggtgtcttgatatcaaggaatttttcagcaccaaggtcagcaccaaaacctgcttcagtaatcgtataatcagccaaacgaagagctgtagctgtagctagaactgagttacatccgtgagcgatgttggcaaatggaccaccgtgtaccaaggctggtgtcccataaattgtctgtaccaagttaggtttgatggcatctttaagaataagggtaagcgcaccttctatttcaagatcacgtacataaactggtgtacggtcataacggtaggcaactacaatgttagccaaacgttctttaaggtcattaatatcagtagccaagcaaagaatcgccatgatttcagacgcaacagtaatatcaaaaccatcttcacgtggaataccattaagtggtccgccaagaccaacgtttacatgacgaagcgcacggtcattaaggtcaaccacacgtttccaaatgatacgacgttggtcaatgccgagagcatttccttgatgaatatggttgtcaagaagggctgacaaagcattatttgctgtagtaatagcgtgcatatcccctgtgaagtggaggttgatatcttccatcggaagcacttgagcgtaaccaccacctgcagcaccacctttgattcccataaccggaccaagtgatggttcacgaagggcaatcattgttttcttaccaattttgttaagagcatctgcaagaccaattgacatggttgatttcccttcaccagctggtgttgggttgatagctgtcaccaaaatcaattttcctggcttattgtctttgacagcattgattttatcaaatgacaattttgccttatattttccgtagagttccaaatcgtcaaagccgattccaactttttcaactacttctgtgattggttttaattctacactttgagcaatttcgatatctgttttcatgagacactcctctatatttttctagaatctattatatcagagtttgataaaaaacgcattatttttggttaattacttttcaatgttcggtttttgttttgttataaatcgttataactttaatttataggggtacgcctcaaaaatacttactttttatttactaaagacccaatttttagtacaatactactatgaaaattttgattacatcgggtggtaccactgaaaagattgatgctgtacgtggaatcacaaaccattcaacaggttatctaggaaaggaaatcgctgaacttttcttggctaagggtcaccaagtaaccttagtaacgaccaagacagcggttaaaccagaaccgaaagaaaatctaaagattacagaaattacgaacgtagaaagtcttctcaaaaagatggagccactcgtcaaagagcacgatgttcttatacatagtatggcagtctctgattatactcctatttatatgacggattttgctgaactggaggacaccgaagatctcgctcaattcttgcataaatctaacactgaaagcaagatatcatcggcttctgattatcaggttctttttctaaaaaaaacaccgaagatcattagcctcgtcaaacaatggaatcctgatattcaattgattggcttcaaacttttggttaatgtaagaaaagaagagctttttgaggttgctcgtgcaagtctgaaacgcaacaaagctgatattattgttgccaacgacttgagtgatattactccagatcagcatattgcctatcttgttgacgaaaaaaacgaggagaaagttacgactaaatctgcaattgctcaagctttatttgaaaggatatgccatgactaaacgtatcatccttgctgtttcaggatcaatatccgcctataaagcagctgatttaacaagcaggttaaagaaaaaaggttatgacgttcacgtcattatgactgaagctgctcaagcctttatcacccctctgacacttcaagtcctttcgaagaatcctgttcacactgatgtcatggaagaaaaattggctgaacgtattaatcatattgacttaggtaaagaagctgacctctttgttgtagctccagcttcagcaaataccattgccaaattagcacatggtctagccgataatatgcttactgctactgctttagctttaccttgcaccacacctaaactaattgcccctgcaatgaatacgaaaatgtatgaaaatccactgactaagaagaatctagatactttgcatgaccttggctaccaagaaattcttccaaaatcaggtttactggcttgtggagatacaggacgtggtgccttagctgatattgatgacattattgaatccattgacaatgctttaacaaaatagccttgcatagaataaaaaggagtttatgatgaataagaaaaataaagcaaaccaaacggctcagttatccctcttgatagctacaatggttgtaatcgaagtactcagtcaaaccatctttgctgcttttgtacttccaatcaaaccaaccctaacccatatcccagttattatcgctagcatcgtctacggtcctaaaattggagcttatttgggtggcttcatgggaattatgagtattattcgaaacactgttatctatacggttagtagctatctctttagtccttttgttgaagggggaacttgggcatctgcagtcattgccatcgtccctcgcatcctaatcggtattttcccctactttgtctacaagttacttcaaaaccgtctaggtttgattctatctggggttttaggtgctttcacaaatacatttttcgtacttattggcatctacttcttaatccctaacttctacacagcgggtggaaaaacactaatggcaaccattttcacaacaaattcgattgctgaaatgattatcgctggcctgataaccctaagtatcacacctgtgttattaagattgaaaaaataaagaaaaaacatggtgattaccatgtttttttcttttaattatggtataatgtaagcgtttaaaaatataaaggagattgctatgtcttacactgaaaattatcaaaaatggctcgacttcgctgaattgcctgcttaccttcgtgatgagttggtcgcaatggatgaaaaaacgaaagaagatgccttctataccaaccttgaattcggtactgcaggtatgcgtggtttgattggtgctggtactaaccgcattaacatttacgttgttcgccaagcaactgaaggtttggctcaattgatcgactcaaaaggggaagaagctaaaaaacgtggtgttgctattgcttacgatagccgtcacttctctcctgagtttgcttttgaatctgctcaagttttggctgctcatggtatcaaatcttatgtatttgaaagcctacgtccaacacctgaattgtcatttgctgttcgtcatctccacacatttgctggtatcatggtaacagctagccacaaccctgctccgtttaatggatacaaggtttatggtgaagacggtggacaaatgccacctgcagatgccgatgctttgacagattacatccgcgctatcgaaaatcctttcactgtgcaattggctgaccttgaagaaagcaaagctagcggcttgattgaagttatcggtgaaaacgtcgacgctgaatacttgaaagaagttaaaggcgttaacatcaaccaagacttaatcaatgaatacggtcgtgacatgaagattgtctacactccacttcatggtactggtgaaatgttggcacgtcgtgctcttgcgcaagctggatttgaagctgttcaagttgttgaagctcaagctgttccagatgctgacttctcaactgttaaatctccaaaccctgaaaaccaagctgcctttgctcttgctgaagaacttggtcgcaaagtagacgctgatgtattggttgcaactgacccagatgctgaccgccttggtgttgaaatccgccaaccagatggttcttacctcaacctttctggtaaccaaatcggagctatcattgctaaatacattcttgaagctcacaaaacagccggtacacttcctgcaaatgctgccctctgtaaatcaatcgtatcaactgagttggtaactaagattgcagaaagctacggcgcaactatgtttaacgtcttgactggtttcaaatttatcggtgaaaaaattcatgaatttgaaacacaacacaaccacacttacatgcttggtttcgaagaaagcttcggttacctcatcaaaccattcgtacgtgacaaagatgctatccaagccgttcttatcgttgctgaaatcgcagcttactaccgctcacgtggtatgactttggcagatggtatcgaagaaatctacaaacaatacggctacttcgcagaaaaaactatctctgttaccctttcaggtgttgacggagctgctgaaatcaagaaaatcatggataaattccgtggcaatgctcctaaacaattcaacaacacagacattgctaagacagaagacttcttggaacaaacagctactactgctgacggcgttgaaaaattgacaactcctccaagtaacgtgcttaaatacatcttggctgatgattcatggtttgccgttcgtccttcaggtacagaaccaaaaatcaaattctacatcgctacagttggtgaatctgaagcagatgctaaagaaaaaattgcgaatatcgaagcagaaatcaatgctttcgtaggcgaataatatttaagacttagagctaagctctaagtcttttttataccgacaaaacttggattacggaagcaagctatcttttttgctactagaaccaataaaccacctatagattaaactataggtggtaattttatgattcaattatagagcactaacttgtgaatgatgcttaaataaggaatgagtcgcttcgtgaatatgacgagcagtttctgcattattcatggtgtagaggtgaacgcctgcaacatcttgagtaacaaggtcgacaatctggtcaatcgcataagcaagaccagccgctctaagtgactcaggatcatgctcatacttatccaaaatggcacggaacttacgtggcaaatgaatattctcacaagtcttaagcaaacgtagagcttggttacgattcaagataggcataattcctgcatgaattggtacatcaattccagccaaggtacatttatcttgaaaatcatagaaacgttcattgtcaaagaagagttgggttaaaagaccagaacaacctgcatcaacctttttcttaaggttttggatatcagagatttgatttggcgaatctggatgcccttcaggatagcaggcaccgatgatatcaaattgaggagcttcttccttgataaattcaatcaaatcagtggcatatttaaagtctttaagaggttccacaccaggaatgatatcgccacgtagggctaagatacggtgtactccaacggcatccaagtcacgtaaggtatcagcaaccttttctttactcaaatagatagctggaaggtgggcaatcgttgggatagctaggtcattttgaatatgatccgccaaaggaaccgtcgtctctttgatattatatttgttattactagctgtaacactgataaagtgtggagccaatccttgcatatcctcaagggcacgtaggattttttcgttacctactgctgggttaggtggaaagacttcaaaagagagtgatggtgtttggcttgtcatattttataccttcttctttttagatttttgttaagacgaaagctgttttaagtgcctactgacttcatgagtacagttaaacaattgttaatcatagcctgcttgcaaaaatctttagaacattattcgctattgaaaaccttctacacttaaggaagaaggtcttcaacatatgataacttcctcttacaagttttcgcgagctgcttttgcagcttctacaagcttaatcaagctttctttagtttctttgattccgcgagtcttcaaaccacagtcagggttgatccatactttaccgcttggtacttttgccaagattgcttcgatagtgtggtcaatttcaccgtcttgtgggacacgtggtgagtggatatcgtaaaccccaggtccaacttctgtttggaagttttgagctttaagttcatccaagatttcaagatttgaacggctagcttcaaatgagataacgtcagcatctaagttatcgatagctgggatgatatctgtaaattctgagtaacacatgtgcgtgtggatttgtgtgtctggtgctacagttgagtgtaccaaacggaaggctggaattgcccagtcgaggtagtcttcataccagtcactacgacggagcggcaatttttcgcgaagagcagcttcgtcaatttggataattttcacgcctgcagcttcaaggtcaagtacttcatctttgattgcaagagcaatttgaagagttgaatccttgatagagatgtcctcacgtgggaatgaccagttaaggatagtaacaggtccagtcaacatacctttaacaggtttgtcagtacggctttgtgcgtagctagaccatttcacagtgattgggttaagacgagtcacatcaccccaaatgattggtggtttaaccccacgcataccatatgattgcacccaaccgtttttagagaagaggtaacctgacaagttttgaccgaagtattcaaccatgtcgttacgttcgaattcaccgtgtacaagtacgtcaaatccaacttcttcttgccatttaatccattcatcagtgatttcagcaaggaaagcatcgtattcttcttgtgacaattcattcttacggaaagccaaacgtttcgcacgaacttccttagtttgagggaatgaaccgatagttgttgttggaagcaatggaagtttgaaagcatctttttgaatcgcttcacgttctgcaaatgctggcaaacgagtgtaatcagcttcagtcaagcctgcaatatgggcacgaagttcagcattttcaccaacacgctcagtcgcaaagagttctttgttggcagcaagggcttctgcaccttgaccattgcggatagcatccaaatcacgcaattcgtccaatttttcaaccgcaaaagcaaagtggttcaagatagctggttcaaattcttcgttagcagttgtaaatggtacatgaagaagtgaacaagatgttgtcaaaacaacattttcagctggcacttgttcaagaattgcaagactcttctcgtagttgttacgccagatgtttttaccattgacgataccggcatagagagtcttatcagctgggaaaccacctttaaccaattcaagtgttttcttaccttcaacaaagtcaagaccaataccatcaactggcaagttcacaagatcgttgtagacatcacgaacatcaccaaagtaagtttgaatcaagacttcaagaccttttttatcagccaagagtttgttgtagagattcaagaagagagctttttcttcagctgtcaaatctttaacaagggctggctcatcgagttgaatacgtgtagcaccaagctctgccaattttgcaaagacttcttggtaagctgccacaaagctgtctacaaagtcttctgctttcacaccatcttcaaagtcagataattgaaggaaagtgaatggtccaacgacaactggacgtgtgttaagtcccaattctttagcttcttggtactcatcaaaaatcttgtgaccagcaagtttaacttctgttgttttttcaaatttaggaacgatgtaatggtagttagtgttaaaccattttttcataggaagggcacgtacatcccctttttcaccttggtaaccacgcgccaaagcaaagtaacgttcaagatctgtcaaatccaagttttgaacagattcaggtacgacgttgaaaaggaaagctgcatcaaggaagttatcgtaatgtgagaaatcatttgaaggaatttcactgatacccttctctttaacaatattccagtgttttgcacgcaagtctttggctgctgttaaaagttcatctgcagtaatttcatttctaaagtatttttctgttgtaaattttaattcgcggaattcacccaaacgtgggaaaccaatgatagtagttgacatcttgtgtcctcctctttgttgttgaacttatcttaccaaagaaacgggtggctgtataattgctattagttttctctatatatagtttttgactataacctataaaataaagggtttctagctaccgttatctccttttgtttagatattgttatagctaataactatatatcaaccagataaatccttttttataacaaaaaagccctagacttttgtctagagactctattatttactaggattaggacactaagctctataagtgctcagtactttctcttgaagccaagatgatgtataagacatattctcactattgtaactattccagataaaataaccaaaaactaccaatactaataagaaacaaattcctaatacggctaaccagatgatttgtttctttaagctatcatactcactcatatagccattatggattttaatgagttcatttctttttttgttacttgactctttagcaatggcaatttctagctcatacatttgatgcttccatgaattcttagaagtgccttttttcattttatggtttgaaagactgctgttgcctttctcaaagttatttttttcagtcatatttccctctaaaatcttcttttagtccctatcattataacatatgtaaaactatctgaaaagttcatttttggttagaattttgagaaagagaattaaaacatgaaaaagaaccagagggaaacttcttatgttatactctaagtatgcataagaaaactgttattgattttaaagaacttggtgtcagacaaatttttacagacgccattaaagaactaaaaacaaagaacattaaggaagttaagtatctcttagctgaagtcgaagcctatcaaaataagggctattatgcagtaggttatgtttcctatgaagctgcccctgccttcgagacaaaatttcaggttattgatggtccattaatgtcagagtatctcctctacttcactattcatgaaactgttcaaacagagcctattccacttgcttatgagccaattaccttaccaaaatcttggctagagctaacttctgcagaggaatacaaggctgctattgagcaaatacaccaccatattcgacaaggtgatacttatcaggtcaattatactgttcaactccaacagaagctgacagctgatccctttgccatctataaccgattggttgttgagcaaaatgcacattacaatgcctttattcagcacgatgatgtttctatcatttccataagtccagaactcttctttaaaaaagatggtgataggctgaccactcgtccaatgaaaggtaccaccaatcgtggtttaacaactgaaactgacctcaaacaagcccattggctagctcaggatcagaaaaatcgctctgaaaatatgatgattgtcgatctacttagaaatgacatgaatcgtatttcaaaaataggaagtgaagatgtcaagagcctttgccaagttgaacaatactctacggtttggcaaatgacttcaactattgagacgcaactcctaccaaatagtcgtttaaatgatgtcttccaagccctttttccatgcggatcgattacaggtgccccaaaaatagcaaccatggagattattaagaaggttgaaaaacagcctcgaggtgtttattgtggagctattggtatcttggtgccacagggacctagtatttttaacgtggccattcggacactacaaatggaaggaaccaaggctatctatggtgtcggaggaggtattacctgggacagcaactgggaagctgaatatgaagaaacaaagcaaaaagctgctgttctataccgtcagaaccccaaattcgatctcatttcaactgctcgtgtccaccaaggaaaactgctatttcttgaggagcatatgaaacgcttgcaagagagtagtcgctactttgactatcctttcaatgcagaaaaagctcactatcaagtcgaagctctgtgccaatcactagactttgacaaagattaccgtcttaaaatgtcacttgcaaaagatggtgaactgaagtttgaacatacccaattaacaaacttatccaatgacttctgccaagcaaggttagttgagcaaaggcatccgttggatagcccctataccttcttcaaaacaagttaccgtcctcaccttagtatcgaacctcacgaacaaatctattataatcatgaggggcaactcctagaaacctctatcggtaacattgtgcttaaaatcgaggaccaactctacacaccacccgttcacctcggcctcttaaatggcatctacagacaaagcctaattgctgataataagcttaaagaaaaagtcttgaccgtaaaagatatggaacaggctcaggccatctacggatgcaatgcggtgagaggcttgtatgaattgaaggtggaaggatataattatatttaacgaaaaaatacaagttttttgttctcccctactcttgctaaagacaaaagaaacttcaatattctattggtaaaaaatcaacaatttaatagtaaaataaagtataatacttactgatagttattcagttatcgtgactgtaatgataagctttttggcttataatttactagccttaaaattcagtaataatttagaaaggatacaaaccttaaatgaaaaaatttaaaggcttgacttctgctgaagttcaagcaagtaaaaacgcccatggcgataataggctctctagtaaagaggctaactcgctcctctcaatctttatcgaagccttccaagatcaatggattcttatcctcttggctgccttaggattaaaaatcatcttcaactttgttggaatgattttccctgctattggtgaagccaactggtatgaggctatctcactaattttcgccattttgatgtctacaggattctcagcagtctcacaataccgaaatgagcaaaaattcaacactcttcaagaagaggcttcaaaaactaatgctaaggtttatcgtgatggtaaacttaaagaagttcttgttgatgatattgtaaaaggtgatcaaattctccttcaatcaggggacaagattccagttgacggtatcatactggaaggtgagttaaaagtaaaccaagctgtccttaatggtgaaagtgaagatgctaagaaacttcctcttggtgatcaagcagaaccagactcttccgacctctttacagagctcaaagtcttccgtggtacagttgttacttcaggtgaagccgttatggaagctacacaaattggtgataatactgttctaggaagcatcaatacttctcttcaagaagatagtaaagattcaccatccaaagaaaaactcaacaagcttgctggaaacatcggtgtcctcggttatagtgcaggtgctgcatattcagtaatcaaccttgttttaggctttattgccctcaataaggctaataacctcaatggtggttcaatcttccttcttatcattgaaacgattctctttgcggttacaatcatcatcatggccgttccagaaggtcttccgatgatgttggcactcgtttcttcaatgaactcaggacgacttttagctcaaaatatcctggttcgccatcctgataccattgaaacagccggatacatgaatatcctcttcagtgataagactggtactatcactgaaggtaaactatctgtagttgacttcttccttgctgatggaacactttatgcagctactggtgaaactgaggctcctgattttgacactatgtcagatagccttaaagctgaaatgattaatggtatcggtcttaataacgacgccatggtagctgatggcagtgctgttggtagtaacgccactgaccgtgcacttcttgatttccttattggtcgttctcaacttgattttgatacaaatacaattactgagaagcaacaattcaactcagcaacaaaattcgcaagtgtaacgactaaggacggaaaaacttacatcaagggtgctccagaattcatcctaaatgactgctactactatcttgataaagatggtaataaacaaaactttacagatgatattaaagctcgtttccaagaattatcattggaacaagctaaccgttcaatgcgtttgcttgctatcctaaatacagatggaaatgataaagtcttgattggtatcgtatgtatccgtgataacgttcgttcttcaattaaacaaactgttgaaacaatgaaccgtgcaggtgttcaagtagttatggtaactggtgaccgtaaagaaaccgctgtcgctatcgctaaagaagccggtatcgttactggtcaaaatgaccttgtccttactcacgatgaactctctgccctttcagatcaagaacttaaacaacaattgcctcacttaaaagtggtcagtcgtgcccttccaatggataaaaaacgtcttattgaggcagctcaagacctcgatatggtcgctggtatgacaggtgatggggtcaatgactcacctgcccttaaatcggctgatgtcggattctcaatgggtgatggtactgaagtcgcacgtgaagcctcagatatcgttatcttgaataactcattgacttcgattgagaaagccgtcctctatggacgtactatgagtaagtcagtaagtaaattcattatcttccagttaaccgtaaacgtgactacaattgctatgtcacttctctcaccactcttgggcctcaaagaaccatttacaattatccaaattctctggattaaccttatcatggacacacttgctgcccttgcctttggtgaagaacctacgctagatcgttacatgaatgaaaaaccagttgctaagaaggcaaatattcttactggctatatgaaatctgctatcggtgtagctagcatcttcattactgtcgtatgtttagcaattcttaaaaatgttggtggtatccaagactttatcacaaatggaactggcaactttgaaatggtaacaacattcacctttacagtatttatctatgctgtcattttcaactcacttaatacacgtagtaatggattcaatgtttttgaacatatcggcgaaaacaagaaattctcaattgtaatgatttctattgctgtcgttcaaacattgatcattcaattcggtggtaaagtatttagtaccgttccaatggacgttcaacactatatcgttgcacttcttatcgcggttttgatcatccctgcagatttaattcgaaaagctctaactaaaaacaaataactatctgtataacgtattataaaacggctctataatttctgtagtgggtaaaaccactgtagagattatagagctttttgagtgtacacaaaaagtcccataagaactataatgaaaagcgaccaaaccatcattaggaagaacttatgagacttattaagaataccacagaattaatcggaattaaagaccaaaatatcaagatttcacttgtttttgaaactgacactcatatagagattcaagcaaaacttgattaccctgcaccatcatgtcctcattgccaaggaaagatgatcaagtacgactttcaaaagccttctaaaatccctcttctcgagcaagcgggaactccaacactactacgtctgaagaaacgccgtttccagtgtaaaagttgtagacgagtcacggtagctgaaacatcgatcgttgagaaaaactgccaaatctccaatctagtccgacaaaaggttgcacaactcctgactcagaagatgtcattaacggatattgcaagaagacttcgtgtgtcgacgtccaccgtctatcgtaagcttgaccagttcgctttcaaggaacattatgacaaacttccagctgttatatcctgggatgagtttgggttcaagaaaggtgaactagcttttgtagcgcagaattatgagaccaacgaactcataaccatccttgataatcgtcgccaaacctctatacgaaactactttttaaagtatccattaaaagctcgccaaaaggtgcagtttatcacgatggacatgtcaggagcctatatgccactagctcgaagactttttccaaatgccgaaatcattattgatcgtttccacatcatccagcaccttggtcgagcctttttaaagacaagaattgcgattatgaatcagtttgataagaagtctctaccctatcgagccttgaaaaatcactggcgtctcttccaaaaagacagccgtaaactatctctcaactctttttactcacagactttccgtcaaacattagcaccacatgaagtcgttgcgaagacattggtcttttcagaagagctctctaatgactacaacctctatcagcttttactttttcactttcaggagaaaagagtagatgagttctttgacctgatagaggaaaataggagcaaggtcaatcattattttcaaactgtctttaggacttttcttagacacaagcaatacatcaaaaacgcactagaaacggactattcaaacgcaaaacttgaagcgactaacaagttgatcaaagacatcaaacggttggggttcggttttagaaacttcatcaactttaagaagcgtgtcttcatcacactgaacatacataaaaagaggacctatccggtcctctctagatgttagcttttcgtcacccactacagttgacaaagagcctataaaacttaaaaggataaaaaggattgagagttatcccaatcctttttaataatttccgaaggtaataccgtggaaagatcataacataaaaaggctttaacaagcctttttgattgatttattaagtaatactacttaaactgactaggagcccctgtataacctgcccaatccttactataaaagcggtcgttcaagttatagctaggtgcaggtgttggattacttacaaatggatcaacagccttgtcaaaggctacccaacctttccatcccatatgaatggtatcttgcatgaagtaaggttgatctccatcttttgagaagtcagcaatattggtgaagccttgactttccaattgataacggattttagaaaccgtagcgtcatacatttcttgacttagtcccgtataagccatccacttgctattaacaggtgggatgacaaagataacgttagtatttgacttcgcaaattgatttaagactaactgtaggtcaccgtattcttgtgaaacttcatacgaaagattcttttggaaacctttaagtttaccaatctttttagccaaacgtttcttatagaaacggtcatcgataccaaagtcgtttgacttggtatgagcttctgcatctcttacggcaacctggtcaagtgcctcgtaagagaacttgtctggcaactctttaagataaggaagaaccttcttgtcgtaatttgcattatttgatgctgcaaaaggactgaacaaggcatcttctcgcttattaagctctgccataaattgaatataagtcttatcaagagaatttaaatcttgtccattagccactttagaaagttgagatttcatagtaacctcaggtttcatctctaagatacgctgagcagcatattgagaatttgcatccgtctgattttgacttaagaaactactaagttggtcgttattgtagaactgctggaaagccgcagaattgtaaccttttttagtaaaccactgtggtgacaagacgtagactgctgtcccatttttcaattcaggaagcatttgttgcattcccaaatattggtttagagaggcagccccacgttgtccaataaaatatgggcgatagttacggtcgtatttttcagctaaaacagctggatgaagggcatcaaaacgcaaccattcactagacccaaagaaagggacaaatcgatgattcttatcagaaagagctgtcgtcttattaatacggctcttaaagttctcagttgtcaaggttactgcgttacgtttttcaacctcataattatgttttctgcctttagggtaggaaaaaataactactactaccaagactaaggcacagattatagggccaaaaatttgccataaacgcttaagcattgcgaagctccgttaccccttcaacaatcttattagctgtgttccagtcatcacgaccaaattctgaaactggcacacgaatatcgaaacgtgattccaattcaacgataagctcaactgttcccatagagtcgagaacaccagcatcgaaaaggtcttcatccatcatgtctgaaacatcttccatgaagagttcatcaataatttcaataacttctgattttacatccatttttataattcctttacttattttttagtgaaccagaggtcattcaagaatccagagaaaatcaagaatgacaacataacagtgttaaatgtaataaagattcccaaagccttcgtccatctattttcaggaagtggctcaagaccagctttcttacgttctttattaatggtcttcttcttgcgcaaccaggcatcattaagtcctagaccaataccatggaaaataccgtaagcaatgtagtaccaagtaaccccatgccagaatcccataaccatcatattaatgacataggccacatttgaagtcgtgttacgatttttgaaaactttatttcgcatcaaaaccataaccaaacgcataaagataaagtcacggaaccagaaagacaagctcatatgccaacgattccaaaattctttcaagtctcgtgagatgaaaggtttgtcaaagttgattgggctcttaatccccataaggttagatgctgccaaggcaaacatcgagtaacccgcaaagtcaaagaagagatcaaaaccgaaaacatacatgacaccaagtgttggtaaattaaagataccaccttgggccaaagcttgtgctttcagtgaaggcaagagcatacttccgaaaatctgagccaaaacaaacttatagaggaaaccaagcataatatattttacagcttgctccaacatattcatcagctcgtctcgctcaggaatcgtttggtaatcttcgttaaagcgtttgaagcgatcaataggaccactcgtaaaggttggcataaagagcatgaatcggaggaactctccaagtgtaaactctttaaggacaccatcccgcatctcgataatcataccaactgatcggaaggtcaagtaagaaataccaagaaagtttaaaagcgactgagtaccatttatcgcaggctctaccttaacaaaaatcaagggaaggactacaagaaacgagtgtaaatagaaaacccatttattatccttttgactacggtaatgtttgtatgaataaacccaaatgatttgccaaacaatatagaagagtaaggctagtaattggctagcatgtgttcctgtcagagcgagaacaataaaggctagacttaccaaacactcataaatcgcaaaacgctttttaaagaagagacccacaaagattggcaatagagctaatccaagatagataaaatagaagggattaccgtaggcttctaaatgaggtagctgttttaagaagtcaatcatcggttgttaacctcactgataagacccttgatatcgattttcccatttggtgttaaaggcaagctctcacgatagaggaacttagtaggcatcatgtaagacatcatgatatcttctaagtcagccttaatcgccttggtgatatcaatttcacgttcaaactgctcacgaacaccatccttaagaatcacataagccaagaggttctgaaccttatggtctttattgtaacgtggcacagctactgctgaatcaatatacttagacttattaaggttttgtgaaacatcctctaactcaatacggaaaccattaaatttaatctggaagtccatacgaccaccgtaaagaaggagaccttcatcggtcatcgttcctacatcaccagtatggtaagcaggaaggccattaaactcgaagaaggcttccgcagtcttttcaggattgttcatatatccttttgaaactgctggtcctgagacgatgatttcaccttgttgaccatttggaaggatattgccatcctcatcgataatataagtcggtgaatcttccttggtataaccaatcggcaaacgcttaaggttagccagcatctcatcagttactgctactgctgataaggctacagttgcttcagttggtccgtaagcattgataatacgtgcttctgggaaacgttggcgaagcttttgagcagtcttgacagtcaactcttctccgtcaaaatagaaatgcgtaatttctggcatcttttctgaattgaagtcttcagacaacattgccatatctgcaaaagatggtgttgatgtccaaatggcaattggaagtgagaagatcgtttcaaagagcttcttgaagtcctgtgtaatagctgaaggaagcgcatagagtgttcctccaagtgccaatgtaggtgcccagtacattaccgataggtcaaatgaataaggcggttgagccagcatttgtggacgttttggagtcgcaaattccttatccgtaatcatccagttggtgaaactaaggagattattgtgtgaaatttggacccctttaggcttacctgtagttcctgatgtgaagatgatgtaataagtatcatcccccttaacaggatgagtcacttcgtagctagtcttgctttcaaaagctgttgtcacttgatccaatgttagaattggagcttggacttcctcaagtgggaagtcattgatagcaataatcagactaggctctgctacttcaacgatagccgtcacgcgctcaagagctgagtgactatcaattggaatataagcgtgaccagatttagtcaaagcgacaaaagttgccaacatttcatactcttgaccgccataaaccacaacaggtgatttttctggaatatcaagactatcaatcttggcagctaggctatccgagtcagcttttaagtcaccgtaagtgtgaacttcccctaaaatattgtaaacaggaaagtcaggttgtgattgagcaaactgctcaatcgtttcgatcatatctttaatttttgtattcgtcattattcttcctaaaattcgttatagataaaattaccttgaccttgtcctaggtaattgtagagataaattagggccataaaaatggcgaaataaagcaaggtttgtcctaaaaacactaggacgtttttatgttttaacattctaattttcgatacctttttttatataatatcctctttagtttaccatcttatcagtattttttccaataaaaaagaaaaaataactaaatttcatttctttttcattaataagcttccgtgataaatgattggctaaaatcataaaaaacagagcttaaaagctctgtcggatttaactattttgtgtcttttgggccgtctgcatacgatagtacattcccttagcttgcatcagttgttcatgggttccgtgttcaacgatatctccattattcatgaccaaaataaggtccgcattctcgatggtagacaatcgatgggcaatgatgaaacttgttcgacctttcattaatttagcgaaggcctcttgaatgaggagctctgtacgggtatcgatactagaagtggcttcatccaagattaagattttaggcacattgacaaatatgcgggcaatggtcaaaagctgacgttgtccctgagaaagggattgtcccgcatcattcaagtaggtgtcataaccttgaggcaactgctgaataaagaaatctgcattggcagccttggccgctgctatgacttcttcacgactggcttctggattaccataggcaatattatcatgaatagtgccgacctcaagccaagtttcctgcaaaaccatcccaatctgtttccgaagactctcacgggtataatctgtaataggtctaccgtccagtagaatgttccccttgtccaaatcatagaaacgcatgagcaggttaatcaaggtagattttcccgctcctgtagggccaacaatggcaacagtacttgcggcagggatatcaatactcaaatccttgataagaggtttattaggcaaatagccaaattggacatgatcaaattgaaaacgtccctgcacatctgcttcttccaagaccgccttacctgtttctgttatttccttttcatccaatatcatataaaggcgatcagcacaggccaaagcactttgaagttcagatagaacagatgagatatcattataaggtttcgtatactgagtcacatagtttaggaaggtagtcaattgtcccactgtaaaggcaccacccgacatgattcgataggcaccaacaccagcaatgagagcatagatcagactattgacaaaacgtgtagctgggttaaccgctgacgaataaaagatagcaccctgtgaataatcagcatacttaccattgacgtctttaaaactcctaaccatctggtcttgagcatttagactctgtactaaagcttcttgagttagactttcctcaatcaactgagtctgcatgcctcgccatttggtttgattgcgatagagttggtagctcttctttgcgataaaacgtgccacaagcattgacaaaggcgtcatcactagaactaagagcatcatgaaccagtctaagcgagccatggtaatgattatgacaaagatagtcaaaagcccaacgaaaaattggttaaagaccatgagaagtccgttgtttaactgatcgctatctgtagtcacacggctaaccatgtctccagttccttgacgatcaaggtaactaagaggcatagcatgaattttcatcatgactcgttcacgtaaactttcgctatatgaataaatcaatcgattataaatcaaagggttaagccactggattgcactattagctaagataactacaagcatctgccaaattaaacgtgacatcaatagaacggcgttcatcttaagaacagcgtcaactgcatcaccaattaagataggtaagtaaaccgttaaggcaacttgaataatggtcccaacagttgctaaggcaaagaggtaacgctgactcaagatatctctacttaaacgtttaagcgttgatttattacttctagccttcatcagcaacctccttttggtgttgagaataatgaatgtcttgatagagtttattagtgttaagcaattcttcatgattacccaagccaacttgatgtcccttatcaagcaccaaaatttgatcaacagcttttagactattcgttctttgcgaaataataatcaaactcgttgatttaagattgtctctgatagccgctagtaggcgactttcagtcaagtaatctagggctgaggtggagtcatccaaaatcaagaatggtgctggtctcatcaacgcacgcgcaatagtcaaacgttgacgttgaccccccgaaaaattacggccaaatgactcaactggctcatctaaaccaagatccttgtctttaacaaaatcagcagcctgagccatgtcaagcgcatgccacagttcttgctcacttggttcgtggtcaagccctaatgacaagtttgaacgaatggttcccctaaataactcggctttttgcgggacgtaggcaacccaagaacgccactctttaaggttttttggtgatttttgatctttgaaaatagctaatgaaccaatctgaggctgatataagttcatgattaagttcaccaatgtcgatttacccgaacctgtaccaccaataatacctagtgactgaccttgagtaagactgacatgaacctcttggagtgatggccgactagccgtaggataagtaaaggtcatctggtcaatagctagcactgtggaagcctggctagaatttcggacttctaaaggtgcctcaatgtcctcatcttggagttcaaaaatagcttgtactcgcttcgctgaaataaagctttggttaagattggtcaacatcatggctaatttaaggagctccgtcaaaatttgcaagagataattgaccagagcaatcagcataccttgagacaaaagaccagcttgaatttgcagatttccttgccaaaggatagcaatcaaggtcatattaacaaccaagaaagtcaaaggactaatgagacttgctattactcctgttttgagctgccacttcttcaagtctttattgacagtagtaaagttatctaattcacgctcactctgatcaaaagcccgaataaccctcataccttcaagttgttgacgcgtattggtaacaatcgattcattaatcactcgaatcttgacatataaaggattgacgatgcgactggctagtacaataataagagtcaataccaagaccatgccaagaaaccatagggtcaagcgtggactgattcggaatgccataataatggctcccgtcacgataatcggcgccctcaaaaagagcctcaaaaattgattgatgcccgtttggatttgaaaggtatcaccagtcaaacgtgtcaccaaacttgacgttccaatctcatcccgcttttcctttgataaacgcatgattttcgcatacaaatcattggttaaaccgcgggcataaccaactgctgctctggatgaaaaatactgtgctgaaatagcaacaacaaccccaataacggcaagtccgaacaagagaaaaatcatcataaacagatgattttggtctttatttggaatagttgtgtcgacaattccagcaatcactagagggaccaagagttcgaaactggcttcgattaatttaaaagcgggtcccaggatactgtctttgacgtatcctctaaaataaactaataatgctttcatttgtctttcctaagtttaacgtccttactcttagaggcgagagaacatacgcatcaaaaagagattaaactgtacttccttagcgtagtaaatatttccgccatttgtataaagttttcctccaccatagtacatggcaaccggttggtaataggtgtatgtttgcccgctagtgtttcctagactcggagcaacgacatttttagagtaagcctttgcgagttcgacggtgttcactccaccattatcagccacataatcaatataggccttaccaaaattataggcttgtactgctgtccaaggatccaccttatggtgggcagcttcttccagattttccgacagcaccgtcaccccttgacgaatactttcttttcgatctgttatggagttggtcacccctgtagaactttcactggactgcatcacgtcatctgtcttccccttggtttctgtgtagatcatagccagaactaaatcgacattggttgtattttcaatgtcgtcctcagccaaaacctccttaaccatggattcataggttaagacatgttgaatattggcatggattcgatagcattggatacctatgatgaggactacgacaaaaaccgccagacgtcttatccatttaaacatattatttattgatgatatcctcgatatttttgatgagaatagagtaggtaccatcaggattttgaataaactcaacactatcagcatcctgatacacattattaggcacgattaactcaattccgttcgataacgataatttttgattctccaatttcttaatttgacgtgaatggtcaatatctgataccgagataggctcaggtatggcctctttgagctcatcaacaaaggtcaaacgagctgtcaaattattatcaaagagctggtctgccaatttttcaggtgataactcttggtcttcttccaaattattgaaaatagcagatttcatttttccttggaagttaaagtcatcctgattaaaattctcggcaatcttctgggcagtgtcttcaaccatcttaatcgattttttgacagattgttcaggctggacctgcaacagattttcagagaaataattagcaaagcttccattatgcttgattcgcttttcaatcaaataatactgcttactactacgattgattaccaaagcttcattgggtgtttgggccgcagaaggcaaattattttgtgacaattgaataggatgttggctatctcccaaagaatgaatcaaactatccttgagagcaatacgcaagaaagcaaaatattcttgcccttctttgtcaaactgaataaagaccaaatcattggtcttttgatcttcagaaatgacaaattcttccttccaaagttgggcaatcttaactgaactttccatcaaatcatctcctatatgactgatgaaaacattctctgcatcgaaaaaaccacgtttagcctcatctgagaaaactttagagagtttctttcgaaaatactcatctaagcgtggcgttatttcaagaggcccttcggctaaaaccagctccgtatcatttggcgaaaactggtgaatgataatgcgtttaatatataaatctaacatagtttttaatagagtgggaaggcatctgtaagagctttaacttctccacgaatgcgttccaaaacttcaggtttatcgtgattttccaaagcttcaaccattaattcagcaattttacggctctcagcttcacccataccacgacttgtgatggctggactaccaacacggatacctgatgtcttgaatggagacaattgctcgtaaggaataccattcttattcaaagtaatattaacttcttcaagaacgttttgtgcaactttaccattttcaacaactttagtaacatcaaccaagaagaggtgattgttagttccacctgagataacacggaaatctggatgttgattgaaaacgtcagccatggcagctgcgttcttgataacattttccccatattccttaaaggcagggtcaagtgcttctttaagagcaacagccttagcagcaataacgtgttccaatggaccaccttgcaaaccagggaagaccgcggaattcaatttcttagcgatatcttcatcatcagtcaaaatcaaaccaccacgaggaccacgaagtgtcttgtgagttgttgtagtggtcacatgtgcatgaggaactggacttggatgatgaccagaggctacaagaccagcaatgtgagccatatctaccatgaggtaagcacctacagcatcagcaatttcacggaatttagcaaaatcaatgatacgtgagtaagctgaagccccagcaacgatgagttttggttgtacttctttagcttgagcgagaatagcatcgtaatcaaggagttcagtttctttatcaacgttgtaagccacaaagttataggtcttaccagagaagctaactggtgcaccatgtgtcaagtgaccacccgctgacaaatccattcccataaccgtatcacctggttgaatcaaagacatgtaaactgctgcattggcttgactacctgagtgaggttgcacattggcaaattttgctccaaaaagttctttagcacgctcaatagcaagagactcgaccacatcaatcacgtctgtaccaccatagtaacgtttacctggatagccttctgcgtacttattagtcaagagtgtcccttgagcagccattacagctttagataccacgttctcagaggcaatcaactcaatattattttgctgacgttctgcctcagcatcgatggcgttccatagttcagggtcaaatgctttgtaatcttctttatcaaaaatcatagaggtctcctttaaggtctaatggggttcaatcaactcacccacatacagtcggaaattatctcacacttccataggtctctgttagtcatttattctatggtcaactcgggtagagccgccaataggtcttcttttgtaatcttcccttgtctgagaattttagccggtgaaacagacaaatccaaaattgtcgaatctacacctaacaaggcatcatcatcttgatagccagtcacctgaaaatcaaattgggctcttatttggtcaaaataacgaccactagccttcccagacttattagcagatggaccaatcaaagggccctcagattgaatcagttctctagtgacaggatgatttggcaaacggaagccaactgtcgccaaacctgaattaatccatctaggtacttgatcattagcttttaagataatggtcagaggtccaggcaaaaaagcatcatacaattgttttaaatatttgggctgctctttcgaataagacaggatatcttcataagaagcgacattcaaattcatggctttatctctaggacgatttttcagctcataaacatggttcacagcactctcatccaaagccttagcaaataaaccatagacagtctctgtaggaagaacgactgcgccaccgtcagccaagatttctcttaacactttcttacttttcatcatccatcacgaccattctatcttgtccaaattggtccttaaggacacgcactcgcttatctggaaaatgtagagacaagagtcccttcaaatcctgaccctgcttatagccaatttcaaagtagagctttccactaggagtcaaatacttatctgcttcctcaataatctgtctataaatagctagcccatcttcatcagcaaacaaggccatattaggctcactcgtcaagacattgacaccaacttcgtccttatcattttcagaaatatagggaggatttgacacgataatatcaaaattaccagaaatatcttcaaaaacatccgattgaacaaagctcatgtctgcctgatttagcttggcattctctttggcaagctctagagcatccgccgacaagtcgctggctgttacgtgccatttggggcgactctcttttaaagacactgcaatagcaccactcccagttccaatatcgagaaccttgagctctttgcttgggttttcctctaaaattaagtccaccaattcctcagtttcaggacgcggaattaagacacgttcatcaacctgaaaacgcaagccatgaaagtcttcatagcccaagatatactgagcaggcttgtgtttctttagttggctaaatgcatgagctaatagctcagcatcttcctctgaaacttcctgacgcaattgaagaacaaaatgagtcaagtcccactgcttcaaaccacgataaacaaaggaaagggcctctgtctcttctccaactgcctcaagctgcttctcatagtcagccagaacatccgctagaatcatttgttaagctcttccaatttttgcgtttgatcataaagaaccaaggcatccacaacttcatctagtttcccagccaaaatcgtatctagtttttgaagggtcaaaccaatacggtgatccgttacacggttttgtgggaagttgtaagtacggatacgctctgaacgatctcctgtaccaacagtagacttacgctcagcatcttgttcatcttgagcgatttgtgcaaagtggtccgcaacacgcgcacggataatcttcatggctttatcacggttcttctgttgtgtacgttcttcttgcatctctactttgattccagtaggaatgtgaaccatacgaaccgcagtcgcaaccttattgacgttctgaccaccagcaccagatgcgtgatagatatcgacacgaaggtccttaggatcaatttcgtactctacttcttcaacttctggcataaccaaaacagttgctgtagaggtatgaacacgaccttggctctcagtcacaggcacacgttgtacacggtgtgctcctgattcatatttgagttttgagtagactgattgtcctgaaaccatggcaaccacttctttgataccaccgacaccattataagaagcttccatgacctcaaagcgccaaccttgtgtttctgcgtatttttggtacatagctaaaaggtcacctgcaaacaaggcagcttcatcaccacctgcggctccacggatttcgaggatgatattcttgtcatcattagggtcttttggcaagagaagaattttcaagcgttcttcgtactcttctttagcggctttggattctttgagttcttccttagccatttcttccaagtcaggatcaccacttgcttccttaatcatctcttcagcgtctgagatactttggatgacttgcttgtactcacggtatgctgtcacagtttcacgagtatttgcctcttcacgcgacaactccatgaagcgtttagtgtctgaaacgacttcagggtcactaagcaattcacccaattcctcataacggtcttcaaccgcttgtaactgatcataaatattcatttgttatctttactccttatataactaatagtcgttttcagccttattcaaagggattatgttttcttgaggtggattaaaccagtgctttcggcaaacggagatataactctcgtgtcctccaatttgaacttgtgctccctcataaactggcttaccatcttccatacgaagaaccatggttgcctttctcgagcaataatgacaaatagtcttgatttcatcaatcttatcagacaaaagcaaaagatatttagaaccttcaaagagattgttctgaaaatcatttttgagaccaaaagccatcactgggatatctaactcatcaacaattcgtgccaaatcatagacattcgcacgggtcaaaaactgagcctcatcaactaaaacgcagtaaggtcgtggatccatatgagcaatgtaaccaaaaatatccgtatcatcaccaataggataggccttccgtttcatgccaatacgactagagatatagccgaccccatctcgattatccaaacgactggtcaacaatactactggtttcccttgttcttcgtaattataggcaaccttaagaatttcaatggatttcccagaattcatggtgccgtagcgaaaataaagttgtgccaaaccagtctcctctaaaatatgtattgtacttattttatcataattccaagcgtaaaagggagggagactgaacaatttttgaaaaaagttcgcctctctcccttatttttatgctaggtttgactggtattccaaatggctcaatcttatcttcctgataaagttttaccagtctaaaagtttcttatgaataggctttagccaatttttcaagaagttcttctttctcctcatcgctggcaaatgaagcttcaattgccgtcttattatgagcataaaagtcttgaactgagctatcaaaatgcttgtgatagagttcgtactctttggtcaggtttgtatcagaaacggtacgattgtccgtattaatagtaatattagcccctgccgctttcatttttagataaggaaaatcagtaactgtaacagctgccttggtctggagattacttgttaaacataactctcctgtgacaccatttttgacaaactcttccaaaagctcgggttcttgagccaaaatcgttgcatggccattacgcttaattcccatggcaatcgactcagccaaaaaggcagggcaaccacactcaccagcatgaaaagtcatcggacggttgtaactttggacttgttcaatcaaaggtttaatcgctttaggtccataatgatgttcatctccagcaaaatcaaaaccaacaaagtcactattttcaacttcatttgcttcatcaagaatacgagccgttaattcttgatctgattggcgcatgccacaaactagggccttggctacaataccaaattcttcttgagcttgacgtaagccttgacaaacagcatcaatggtctcagcgacagtcaatcccttatccattgacaattctggagcaaaacgcacttcaatatagatgacattttcaagagcagcctgttttgcgacatcataagccgcaatagtcaaggcttcctttgtttgaagcaaaggacgaatataatcaaaagcctcaagataatctaggagactctcacaggtagccggtgctgtcacatgatgtttgagctccgcatcgtcctcaggtaactcaatctgtgccaagtcagctaggtgacgaatggtttccaatgatagagaaccatccaaatggcagtgtagttctgttttagccaacttatgaaaatcaatagcagtcattcttttcttcctctctaaacaatatgtttttttatcagataaaaattaatttttactatcttatcattcttatggaaaaagtcaaggtgccgctcctaataggacgtagtagattcttgaaatgccattagcattttgttaggatgtaactatcaagaatacaaggagaaactttatgtctgactatattttaccagaagtttgggaaaacccaacctctatgggaggtgcctggggtggcctcaatcaacctacagctggtgcacgttttgaacaaactttacctaaaggtgaccaacctttccaactctatactcttccgacaccaaatggtatcaaggcaactatcatgctggaagaattgaaagaacttggtgtaactcaagcaggttatgacgcttatcgtattaagattggtgacggtgatcaattcggctcagactttgtttcaatcaatccaaactcaaagattccagccatgatggattactctgaagaccaaccagttcgtgtcttcgaatcagctaacatcctcctttacttggctgaaaaattcggcaaactcattccaactgatcacggaaaacgtacggaagttctcaactggctcttttggcaaacaggtgctgctccttttctaggtggtggctttggacacttcttccactatgcacctgaaaaaatcgaatatgccatcaatcgttttgccatggaagccaaacgccaacttgacctgctggataaagaattagaaaccaaaccatatattgctggcgatgaatatactatcgctgatatcgctatctggtcttggtatggccgtcttgctcaagataagatttgggataaggctggtattttccttgatgttaaagaatacaagcatcttcaagcttggactgaaaaaattgccgaccgtccagcagttaaacgaggacttgaagtcgactataaagaaatctaatttttataacggtttgcctaggctaaccgtttttctattgtttcatgatataatagaagcaaaatcacaaggagacattcatgactgtatttcaagctattttagaaaaaatcaaagcctacgacactattattatccaccgccaccaaagacctgacccagatgccattggtagtcaggtaggactgaaggaaattttaaaaacaaactttccagataaaaaggttcttgcgacaggtgtcaatgaacctaccttatcttggattgctgagatggacgaggtagctgatcaagactatgaaggggcacttgttattgttaccgatactgccaacacccctcgtatcgacgacgatcgttatgataaaggtgacttccttatcaaaattgaccatcatcctaacgatgatgcctacggtgaccttctacttgttgatacgactgtttcaagtgctagcgaaattgtgacagactgggccctcagccttggtctttccttgtcagatgctgctgctcgtgttctctacaatggtattgttggcgatacaggtcgcttcctctttccatctactactcctaaaacacttcaaatcgcggctaaacttcgtgaatacgactttgattttgcagcaatggctcgtcgtatggacagttttcctttcaaaattgctaaactacaaggttatgttttcgataatctagaagtcgatgaaaatggtgcagctcgagttgtcttgacacgaaagattttggatgaattcaatgtcactgatgctgaaagttctgccattgttggaactccaggccgtattgattgtgtcgaatcttgggctattttcgtagagcagcctgaaggacattaccgtgtccgtctacgtagtaaaagcattgtcatcaacgagattgccaaacgccatgatggtggcggccacccactagctagtggggccaattcctacagcttagaagaaaacgaacaaatctatcaagaaatcaaggatacagttacccatgcaactcactaatcgtcgtgtacgtctcatgggaactgtgattgacgtctctatctatcataaagaaccagaacccctgctagaccaagttgaagcacttctacatacctacaataagcgcttctcagccaatgatgacagttccgaactcatgaaaattaacaaggcagcaggcttacatccagtgacagttcacccagagctttttgaacttatttctcttggaaaatggcatagctgccaacctggaagtcaccttaatattgctatcgggcctctcattcagacttggcgcattggtttttctgatgctaagctgcctcttcctgaagaaattcgtccgctcctagatatcatcaatcccaacgccattcttctatccgaggaaaatcaaagtgtttttctcaaagaaaaagggatgaaaattgatcttggtgctctggcaaagggatatattgcagattgtattgcagattttcttaaagctaaaaaagtaatcagcgccctaatcaatctcggaggtaatgtcctaacctttggaccagctctccataatcctgaccaaaaatggcgcattggtattcaaaatcctaaggagactagaaatacaaatcttatggtgcttgctataaaagatcagtctgttgtcacttcgggaatctatgaacgcacttttgagatagatggcaaaacctaccaccatatttttgatagccagactggttatccagtcttcagtgacctagccagccttaccatcatttcatccctctcagtggatggtgaaatttggacaacccgcttattcggctctagtatcgaacatattttccaggaagttagttcacaagctgagcttgaagcaatcatcgttgataaagacaatcactgctttcagacaggtggcatatacaaaatgcgaatttcctaaaaaatagtaaaaaagacttgtcaagtagaccaccttttgataaactagaatagttaaaaaaaactatggtgcggaaagtaccatggcagaaaggaaatattttaacatgaaaaaagatatccatccagattaccgtcaagtagtattcatggacacaactactggttaccaattccttagcggttcaactaaacactcaaacgaaacagttgaattcgaaggtgaaacttacccacttatccgtgtagaaatttcatcagattcacacccattctacactggccgtcaaaaatttacacaagcagacggacgcgtggatcgtttcaacaaaaaatacggtctcaaataagcaacatcttgttgttaagccattccgattggaatggtttttttgtatgctcttgggtataagctctcctactcccatctttataaaataaaaaaacagcttccatatggaaaccgtttattcctattaacctgctttaccaatagccaaagcccagataaaaaagagggcaaatccgaacaagaagatcaaacctgcaatggcaagtcctttcaaccaagttggaaggtctttcttctcttttgtaacaagtacgtaattcaaaagcgcaaagaaaggtgttgtaaggaatgaaccaatcatggcgaaacgaagcatggttgctacttgaccttggaagaagaaaataatgatgagaccaagaatagctgtcaaggtcatccaaacattcaaaggtgtttgatttttttctttttggttaaacaaaagacgaagagaaatttcgttaacacgtgagtaaccatcaataacggtaattacagtaccaaagatacacaagaaagcgataaaggtaatcaaatagcgtgaccactcaccaagcactgatgcgtacataccaacaaactgtgcaatatacttagctgatgctgcttctactggtttaccagttgggtactggataagagcaccgagtgctacaaagaataccgcaagaatagctgttccgatgtaaccaacgttaaagtcaaagagggcatcatcagtgttgaaatcaacagttttctttttctcagctgaccaaagtgagttaatggctgaaatttcaattggtgctggcatccatccaagaagtgaaacgataaatggaagggctgcgagctgccatggtgttttttcaacgaagtcagcactgtactctggatgtttgattgccgcaataataactgctgctactgttgcaatagtcaaagctgacatgatccatttagccataccatcaagaagtttgtaaccaccaaagagtaacatcccccagataatggcaaccaaaatgattgaccatgtggtaatagtcaaaccaagcattggaaaggcactagcaatgatggctgaacaaagaatagaaactcccgcagtattaaccaaggctgagaagacattcaaaatgaagaatacccaaagatagaacttacctttctcagcataaccttcaactagggttttacccgtatctgcggtatactcagcaccaaaacggaaaaatgggtatttaaagaggttagcaagaataaccaagcctaacaaggcccatccataagaaccacccgcttgggttgaagaaacgatgtgggaaccacctacggccgctgaagccattaggataccaggtcccattgcttttattttactacgccaggtagactgactagatacacttgtttgtgacataagagaatctcctaaaacaaattttcagaataatctgaattgatgtttaccattgtgcacaattgttggaataatttcaatagtatttcacatattttctgaaaaatagaaaaaagccatccaaatggatagctcttttactatttagaaagtcctgtaaagaaatctacgatagcttgccagatttgtgcaaaaatatttttgctgttctcaaccgctttgttggcattgaagtttaagttgattccagagaaggtattaccagctttcgaaacgatagaatccttaagtgaactcaagctcgacttgaaactagcactatcaatgattgaagacttagacaaattcaaagcaaaattcaccagaagattaatttgcgtatctgaaagatccaagttatagttattaaccgtttgctgaacaatcgttttagcttggtcttcagtcaacttatcccctttatcagcaactgctgacttaatatcagtcatagctacattaagcttgtctgcatcatagtcagtcttacctgaattttcctcattaatttgagaaagggttttgagttcctcttgcgcaagctctttgctttcatctgaaactttagctccattttgctcaagggaatagtaaataccagccaaggcactttctccagtaactgcgattggtgctgctaccgtaatcttagcatgttcaataccaagtgtcgtggcagcattacggtacatatctggagtgattttcgtgatattttgcggtgtcacaatctctacactcaaggtttccttagcacccagcttagcaatcttaaccgaagaatatagctgaagactagaatcgtcagccacattcatgatattagcgtaagcagatgtcgtcaaggtcttgacattagtatccttactactatcataccctaataaattcaaggtttcatttcgttgctcttccgacaatgaataccccatcacatagtctggttgaacataagattcatcaataaccttttggacttgtgatgatgttgctgcttgagcaaccgaagtaaaggctgttactgaagccaatatagccatcccagcaacaagaagttttttcattttcatgtgtgtttcctttcgaaaatagaatagtatccataatctcctgaaggacgaccgagtttgaactcagccgtgaattcattataccatgacttaaaaaaatggggtcaaaaaaactactcatgcaactccaaggggagcccgtcaggatcgtcaaaaaaagtcatcttttccccggtaaaactgtccttgcgaatcggttggcatgaaatatcttttgttctaactctttgacaacctcttcaatattagtcactctgaaagctaaatgacgtaagccacaggcctcaggataagacggacgtttagggggctccacatagttcggattactggtcttattgccgaaaatttcaagttctatatctccacagcgtaggtctaacttataatcatgacgttctggacggtgattttcccgaataatctcaaaaccaagtttattgacataaaaatctcgagacaactcataatcagaaataatgatggcaacatggtgtaccgtatttaaaaacatattttcctccattgaaaaaggcccgaaggccctttcttaactttgaaattgattgtatgacttattaaaggcttcaataatatctgaacttgccttgtcaaaatctacctgtgatttcaattcacctttgacgattgtacgctgagttgcttcggcatccgtacaagttacaagggtaacttcagacttgccaggtgtatcatcaactactgctacttcagttggttgaacaaccttcacctcactaataacataagtatagactttatttttatccgtaagataaatcttcataccttccttagccttatctagcggtgaaaatagcatgtcagatgcaccggcaataccaaagacgtggtggctagctagtgaatagttgttttcaccacccatgacttgatcttctttcatcgttcctgcaccgtaagtcaactctgtattgccaagtcctttgaaaatagggagattgatacctacctctggaatagcaataccaccaacgacaggaagctcttgagcatccatctgagcctgcaagacagactctgtactaattgatttaacggtatcaaagtcaaagctagtcttagcttccttgtttttctcaatagtctttttagaaaccttgctcacttgatacttatttgtattccaagcaatcactgtgtttcgaatagacttattgaaaatcaaggctaaaccaacaaccaagagaacaacaatcaacacccagcgaagaatatcaagccacttacggcgtttttttgttacgttatttttcttatctttgctcattagttgtcaccactttcttgatcttcggaagcttgttcaacttcttctggctcaactaaagcaaaggttacaatacgagcagagtcatccaaacgcatgaccttaaccccttgagtggcacgaccggtttgtgaaatattagcaacggcagtacggatgataacacctgtatcggtgatgaccatgatatcctcatcaccagacactgttacaatacctgctaggttaccattcttctctgtgatattggcagtcttgatacctttaccaccacgacccttcgttgggtattcagtagctgaggtacgcttaccgtaacctttttcagtgataatcaagacttcttggtcttcggtaatggcagctgcaccaacaacttggtcaccatcacgaagagttacccctttaacaccggcagccatacgactcatgcttcgaatagtatcctctttgaaacgtacactgtaaccaaatttagtaccaatgacaatttcttcattaccagtagtcaagaaaacattgattagctcgtcaccttctctaagtttcaaggcaatcaacccattttgacgaatgttcttaaattccgcttcttttgtacgtttaactaaaccttggcgagttacaaagacaaggtgattattttcagaagcttcatcactcttggcattaatgactgtttgaatggtctcaccttcgtccaacttcaagagattgacgataggtaaacctttggctgtgcgaccgtattctgggatttcataccccttaagacggtatacacgtcccttattagtcatgaagtaaaggtgatcatgagtgcttgttgagacaatatcacgaacaaagtcatcatcgttaacaccagtaccttggacaccgcgaccaccacgtttttgtgaacggaactcgtcttgggctaaacgtttaatataccctttatttgagagagtgataacaacatcttcttcctcgatgaggtcctcatcttcaagagaaataacttctccgaccataagctctgtgcggcgagcatctgcaaatttacgcttgctttcgtccaattcttccttgatgatagcaatgacacgttctggttttgccaaaatatcagctaaatcagcaatcagagccaagagatcattgtactcattttgaatcttatcacgttccaaacctgtcaaacgacgcaaacgcatatcaagaatagcttgactttgacgttccgtgagttcgaagcgagccatcaactcagcttgagcctcagcatcagtttgactgttacggataatcgtaatcacttcatccaaatgatcaagggcaatcaacaaaccttctaaaatgtgggcacgtgcctcagccttatccttgtcaaactgtgtacgacgaaccacaacttcttgttggtgcgcaatatagtcagccaagatttgacgaagggagagaatctttggaacacctttttcaatggccaacatgttgaagctgaagttagtctgaagttgggttaatttgaacaaattgttcaagataacattggcagatgcatcacgacgcacttcgataacaaagcgtacgccttcacgagaagactcgtcacggactgctgtaatcccctcaattcgtttttcttgagctaaacgaacgatatgttcatgaaccttggtcttattgaccatgtaaggaaactcagtgacaacaatacgctcacgacctgatttagttgtttcaatttcagtacgcgaacgaagaacaatagaacccttaccagtttcatatgcacggtgaataccagatttccccatgaccaagccaccagttggaaagtctggaccaggaagaacttccatcagttcacgtgttgtgacttcaggattatccatcatcaatttaacagcatcaatcgtttcagccaaattgtgtggtggaatgttagtcgccataccaacggcaatccctgtcgcaccattgacaagaaggtttggaatacgtgacggaagaacgattggctcacgttctgatccatcatagttatcttgaaaatcaacggtattcttattgagatcacgaagcatttccaaggcgattttagacatacgcgcctcagtataacgctgagcggcagccccatcaccatccatagaaccaaagttcccgtgaccgtcaaccaacatgtaacggtagctccaccattgcgccatacgaaccatggcttcatagatagatgagtctccgtgtgggtgatatttacccataacatccccggtaatacgggcagattttttatgtggcttatcaggtgtcaccccaagctcattcattccatatagaatacgacgttgtacaggttttaaaccgtcacgaacatctgggagagcacgagacacgataacactcatggcataatcgataaagcttgtcttcatctcagacgtcaaattaacgtcaattaaattattatcttgcactctaaaaatgcctcttttctttcattcaaatcattccaaattctcataaaagagaatggaaaatttctataatattataccataaaacgctttatatttcagttatgtaaacgctttcattcaataattccttaatatttcgtgacatctatcacttaaaatggtagaataagcagtgtacggggtaacccaataaaaaattaaggagatgtttagaccatgactgcaactaaacaacacaaaaaagtcatccttgttggtgacggtgccgtaggttcatcttacgctttcgcacttgtaaaccaaggtatcgctcaagaacttggtatcatcgaaattccacaattgttcgaaaaagctgttggtgatgcgcttgaccttagccacgcgcttgctttcacttcacctaaaaaaatctatgcagctaaatatgaagactgtgcggatgctgaccttgtagttatcactgctggtgctcctcaaaaaccaggtgaaactcgtcttgatcttgttggtaaaaatcttgcaatcaacaaatcaatcgttactcaagttgttgaatcaggattcaacggtattttccttgtagcagctaacccagtagacgtattgacatactctacatggaagttctcaggattccctaaagaacgcgttatcggttcaggtacttcacttgactcagctcgtttccgtcaagcacttgctgaaaaacttgatgtcgatgctcgttcagttcacgcttacatcatgggtgaacacggtgactcagagtttgcggtttggtcacacgctaacatcgccggtgtaaaccttgaagagttccttaaggataaccaaaacgttcaagaagctgaattggttgagttgtttgaaggtgttcgtgatgcagcttacacaatcatcaacaaaaaaggtgctacatactacggtatcgcagtagcacttgctcgtatcactaaagctatccttgacgatgaaaatgcagtacttccattgtctgtattccaagaaggtcaatatggtgtaagcaacgtctttatcggtcaacctgctatcgtaggtgcacacggtatcgtacgtccagtaaacatcccattgaacgatgcggaacaacaaaagatgaaagcttctgccgatgaattgcaagctatcattgatgaagcatggaaaaaccctgaattccaagaagcttcaaaaaactaatttgacattagttaactagaaaaagtctccgaaaggaggcttttttagtatcttaaagagacaaaaacagccaattcgaatgaattagctgtttcatattattttgctgagatagctgctttagcaatatagctaagtggttggttaaagtgtggcaagaagaacaaatcaagcaattgtagacgatcaattgttactccttcttgaattgccaatgagaacatgtggattcccatagagatatccatacgtgaaaccatttgagcccccaaaactttacgagtatctttatcataaacaatcttgatagttacatcttcattttcatcttccatgaaggcagctttttgaagatctgttgattctactactgctggattgaaaccaaagcgttttgctttctcttcagtcaaaccagtagaaaccatattcaaaccatagatagagataccgtttgatccttgaacaccgtttgattcaacatcaccaccaccggcattgtgtccaccgacgatacctgaacgaacagcatttgaagccaaggcaatgtagttgacatcgtcaagagcattgtcataaaccgtagcacagtcaccaacagcataaacgtccttaactgatgtttcttgtttcttattaacaaggtatgcaccgttgcggaatgtttccaatttaccagctccaagggctgtattaggacggaaaccaacagcaagaacaaccatatctacatcgtaagcatttttatctgttacgatgcgttctaccttagtttcaccttctactgctttaacagtttcgccaaaggccaattggataccattgtcttccatatttttagccataaggtctgtcaaatcacggtcatagtagcctgccaaacatgtgtcaacaacatcaataaggataacttctttaccatgacgttggaacgcttcagccaattcaacaccaatgtaacctgcaccaactactgctacacgtctgatatcttgcgatttatcgttcaacttatcaataacttcttgagcattttggaaaagtttaacaaattgaaggttttcaagagtcgcttcgaaagtacggctaccttctttaatctcagcaccttcgattggaggcaagattggttgtgaaccagtagccaaaatcaatttatcatatgattcaacatgttctttaccatcaacaagagctgtaacagttttaccgtcaaagtcaatagactcaactggtgagttcatataaacttttgcacccttgctttcaaggccttctttggtggcatagaaaagcccatcagaaccagaaatttgattaccaatccaaagagccataccacaacccaagaatgaaatgttagagttttggtcgaaaacaactacttcattttggtctccgtaattatcaagaatagtattaatactaaaagtaccagcgtggttagcaccaacaactacgatttttgacataagtttatccaactttcttttgataatagttttactataatagtttaccataatcagaaaacggttacaccttttatgctcagactttgttactttttgaacaaattaagatattttgatataaaaccaccattttattggttcaagacatattaactaatgtcttatgttgaataatcttatcactaactgaccttagagtctctatcattaagctattatcaaatcctaataaggactacttagttcctaagacactcaaaaagagtgagtgacactccaactcataaagaagatgtcaacactctttttgattatactaactcattaaaatcccaaacgtccgtccaaccttcataaaattcaggttcgtgacagaccataagaatactacctttgaaagcttgaagagcgcgttttaattcttccttagcatcaacatccaagtgattagttggctcgtccagaacaaggacattgttttcacgattcataaggagacaaaaacgaactttagcctgctctcctcctgacaagacctgaatttgactttcaatatgtttagatgttaaaccacatttggctaaggctgcacgaacctcagcttgatttagagctgggaaagcatcccaaactgcttcaagtggtgtctgacgtgagccttctgcctcttgctcaaaataacctaggtcaataaaatcacccgtttcaacttctccttcaagaggttgaataatcccaagtaaactcttcagcaaagtggtcttaccaataccattggcaccaacgatagctaccttttgattacgttcgaaagtgagattcaaaggcgacttagtcaaaggacgatcgtaaccaataacgagatctttggtttggaaaataaaacgtccaggcgtacggctttccttgaaatggaattcaggttttggtttttccgcttgcaactcgataatttccatcttatccaatttcttctgacgagacatggccatatttcgagtagcaacacgcgctttattacggttcacaaaatcttgaaggtccgcaatttccttttgctgacgttcataggcagcttctaattgtgcttttttcatagcatagacagattggaaattgtcataatcacctgcatagcgaaccaaatcttgattttcaacatggtagacaatattaatcacatcgtttaagaatggaatatcatgcgaaataagaacaaaagcattctcatactcttggagatagcgtttaagccaggcgatatgttcagcatccaaatagtttgttggctcatcaaggagcaagatatctggtttttcaagcaataatttagccaagaaaatcttggtacgttgaccacctgaaagatccgttacatctgtatccataccaaaatccataacacccaaggcacgagcaacctcatcaatcttagcatctagggtatagaaatcacgagtctccaatcgatcctgaagctcacctacttcttccatcagagcatcaacatcagcaccctcatcagccatagacatgtaaatctcattgattcgctcctcagtcttaaaaagctcatcgaaagccgtccgaaggacatcacgtacggtcattcccttttcaagaacagcatgctgatccaaataacccgctgtcacatacttagaccattccaccttaccttcatcaggttgcaattttccagtaacgatagacataaaggttgattttccttcaccgttagcaccaacaagaccgatatgctcacctttgagcaatcggaatgaaacattttcaaaaatggcacggtcaccaaatccgtggctaagatttttgacttctaaaatagacatagcaaatctgggctaaaacagtctttagccctttcctttcttgacattaacttaactattttaccattttttagtgcaaaattggacctctgcttatggaaaatcgaaaagaaaaagcaggaccaacctgctgaatctttagtttctccgtaaaatgcgtttaaacacaggatataaaagaggaaccgcaatgattgtaacaactgatgtcccaaaagtcccaccaatcttaaccactgaagccaacattgcagcttttaaaggtagagatgcgacgacagtgtttataattgtatatttgacaaagttaagaatgattttcgtcactgcagctatcactccagcgataatgatgtaaaccattttatcatttgattttagaagcttttcaaaaacaagatagagaacataacaaacaatcaaggattctaaaatagtaatccagacctcagcggcataaccattgaaaatatcaaatagtcctaatcctactgttgcgactaacgcaccttttctagcaccgaaaatcaaaacagcaatcacaactagggcatttcccagatggacaaattgaggtccaaaaggaatacgaataaactgtacactcacaataattaaagctgcatacaaactcaattcaactaattcacgtgttttatcacttttcatttttctcctccaatagagcattaaaaccactgaataaataaccgatatgaggctcatagcaaagaccatattttaaaggacgaccatcagacagtgttgacgaaagaaccctatccataacatccaaggccaaatcacaaacctttagtaaatcaagattataaaagtaacctgctgataagattgccgttagcaaatcgccgcttccataaaaatgatagcgataacgtttttgcatgcgataaatcgttcgattagtctctttatcaaaataagccagcccaattttatctgtctcaaatgagatacctgtcaaaataacttttctaggtccaagcttggtcaactctctcagaagcttttcaatagtggcctcatcataggaaccttcttcaagatagggagtatccgtcaaaaaggcagcttctgtcagattgggaatgatgacatctgcttgttgacagaaagctttcatggcttctacatagtttctatcaaaaccttgatagagactaccattgtcacccataatagggtcaacaaatagagctatctgtttatcgcgagccaattgacctacacattttagtgcttcttctgacttaaaataaccactcacaaggccatctactataaaatccaagtgctcccactgcttacaaaatccctttaggtcatccgtaagatcccgtacatagatattttcaaactctcctgtatgcgaagataaaagaaccgttggtaaaggaaggacttcagtttgacaagctgacatgatagggaggctactagttaaagcaaccttacctagaccaaccaggtcattggcaacaattactttggtcatctattttccttcccaggtctttttaaactgtttaacaaaacctgtgtggaaataaatgtagtaggccactcctaaaccaagaatagcagctacaatgtcaaaaggaatcttcataatagcataggcaggcgtaccatagataaaggctcttcctaagccatatccgactaagtcaataatagccccaatcaagagacctaaagctgccctagacttgctcaattttcctaagtggcctccaacaatgagtgcaatagcgagaacttgaaggctgtgtgttactagagttacccacataggaagagggtaaaaaagaaaatctccaataaaggaacctactccagcaataataactgcttctgtaggtgggaaaattaaaccaactaggaaaataataatcccgttaaaatagaaatgacctcctggcacaggaatagataagagactcgagctcaaaataatgacaagtgccatgaaaaatgcagaaatggttaaacgttttgctgacatagctaaaactccttagtcaataaatatagtataagtttatgaaaattctgacgattaaacaagatagtattttcattactgtctgggtacagatttaagtcaataaaaaaacaccacacattcatgtggtgataagacttattgagcttttttatcaaagtatttgacaggtgccttttcaagattttgtagtgaaagcttggcagtcgcgtttgcctcagtaccataatcagaaaaatcaatgctaagatcatgatcaaaatcagcaacggcatagtcaacaacgatttctttaacttccttaggagcaatcttggtcttatttgcaatcttatctcggtcatcatctttagaaaagaccaatgtagcaaccttcaattcttccttctcttgtttcacatcaaggaccaccttcatcaaaagagtgtaggcattcattgtttctttacttgagttgctaagtttatagtgaacacgaacagctttttgaccttctggtgattcgattttagttgcagaaagaacttgtacactagcatcttgtcctgtaaatagcattttgtttttatcgtaggtccaagtaggctctttctctggtgtgcaagctgacaaaccgataatggttaagcatgcaagagccagaagtcctaagattttcttaaaagtcattcttacaatctccttaaacttgtttgggatggaaatttagtatttcctaataacctttttattatgtcaaaatctaataatcttgtcaaatgtctccagacatcttgctctcagaggacaagtagggtacaataaggaaaaatctgtaaggggtcagttatgagtatttatcaagatattgtcgagaccatcatcaaagatatccaaaatgggactttgaaaaaagggagtaagctcccctctattcgtcaactaagccagactcatggctgtagtaaggataccgcccaaagagcactcttggaactaaagtatcaaaactatatttatgccgtacccaaaagtggctattacgtcctagaaggtcgtaatgaagttgataataaggtgcttcttaaccttaacgattacaatcaattggcctacgaggattttaagctgtgtttagatgaaagtttggcaggtcatcaagactatctcttcaactattatcatgaacaagccggactcaaagatttgcttgaagccttaaagagtcgattaatagctgacgatatttatgtcaattcggatcagattgtcataacctcaggaagccaacaggccctctacatcctttcacagatggattttggtaatgggggctacaaaattctcttagaacaacctacctatcatcgcatgaaccagctcgtcaaccgtcagaatctagcttacgagacgattaaccgtggttttgatggtttagattttgaccgcttggaagagtactttacatctggacagattaagttcttctataccatcagtcgttactccaaccctcttggattaagctattctgccagtgaaaaagaaaagctagcccaacttgccaatcagtacaatgtttatatcgtcgaggatgactatatgggagactttagcgatagtaaaaatctcccgattcactactatgacacccaaaatcagaccatctacatcaaatccttttccatggctctttttccaggtttacgtctaggtagccttgtcttacctcctaatcttaagcccacctttttgagccacaagggacttattgactatgataccaatctcatcatgcaaaaagcactttccgtttatctcgaaaatggcatgttccaaaaaaacattaaaaaacttggtgacctctttcagcaaactatggaaaaaagtcgagaaagcattgagaatgccaagatttctactccttatcagatttctcctagacatattacctggcagcttcctaaaggactctctctagaaaaattcaaggcaaaaaaacagattcgctttttagaatcctcctttattagaccaacttctgaaacttatctgcagataggtcatggacaggaactggaatcctttataaaacttttaaaaaagacaaagtgacaatcagacacaaaaaaagccatcgcttgatggcttttcttatttagtctgctcaaagcgtaggtgtacaatgaccttgtcaccataaccgttacgctccaaatctcgttgcaaacggtatgaaatataatgctcggcaatattgataaagcctgcttccatgagacgattttcaaccaatgactgaatcatgttaatggttgggcgttccacctgagcatcttgaagatcaagcactacttttttcgtcacttgagcaaggttttggcgccaagtatcatcaagaacatacacagtctgtgctgcttttaagatggcttggtaaattttatcaggatcaaattcagcaacttgaccattacgtttaataatttgcatggctaccctcttttcatggctttttcttttattatgcagagaatttacatatttgtcaagtgcaaatccctgaaagagctatccaaaccgcttattcccagaatttagaaatgtaaactggtttgccatgtttatcaaaggaaagtgttgccgtgtaggactctgcctcatgatggcgcatataattagcgattctcttatcaccgtttatcaggtgaatgtcataaatctgcccgtcagagcttacaaagtgagcattaatcctagcactattcgtttttgtcccaacatgactaatatctattttttccacttgaccatcaatggttttagctataggacctctatagtctttgtaaatagtgacggtagccaaaacatcatcaactaaaacataggtcattccgaaaacgaacagataaactattgggatgacaatgaaagataatttacttttgcggaacgtttctttatgccaagcccaaatatcccgaggtgacatggttaaaaattttttaaaatattgatgaacgaataacctgtagactaataatacaaatattacttgccccaagggataagcaaaactgggtaaaccatcaatcagaacattgactttatcagattcaaaagtgtaatgtcctaataccccatcaaaaaactctaaaaacaaattaactcctttttgtaatatagtctagtcacttaaaaatccatcttctcagatggattttttaactattaacgaacctctgcttcgactttctcagtaagagctttggtgattttttccatgtatttagcaacttcttcgtctgtgaggttgtcatttggattttggaaggtaaggctataagccattgatttcattccagcaccaagtttttcacctgcgtaaacatcgaagagtttaacggcaaccaagcgtttcactcctgcagagtagatagcatcaataacttcttgatgagtgatttctgccttgagaagaagggcgatatcacgtgatactgcagggaattttgtgatttcaacaaatggttgagccggttgcaaggctgcttctacagcactaaggttaatttcagccacataagtttctggaataccgtagtttttagcagtttgtgggtgaacctgaccaaggaatccaatcgtttgaccatcaaggacaatagcagctgtacgacctgggtgcatacttgctaggtcttttgtcggtacatagtcaactgaaacttcaagtttatcaaagagagcttcaacgatacctttggcatagaagaaatcaactggtgttgctttggtttggaaatctttttcagctacaagaccagaaatagcgaaggcaaaggtattgatttcatttggcaattcctcttttggattaccgttttgttcaaagaccttaccaatttcgtaaatagcaacgttactattcttacggttaacattgtaagcaacagtatcaagcataccagagaccatgttctgacggagggctgaacggtcaacagtcattggccacatcaactcagtcaagttagtaggtgtcacagcaaattcaatagctttttcaggtgtagtcaaagcatatgagatgatttccgtcaatccagcaccttcagcaatggtacgaaccttacgacgaagtgcttgtgtttcagtcaactcaccggctgtccctgctgcttctggaagtgtcgtaggcaatttttcatagccgtagatacgtgcaatttcttcaaccaagtctgcttggatactgatatcccaacgacgacgtggtacagatacagtgaatttatcagcatcaccagtcaatccaaaaccaagtttcgcaaacacatcttcaatatccgcaaaagtcaattctgtaccaaggcgaacatttacgtagtcaaggcttgtagaaacttggactggctctgtatcaacagatcccgcttgaacacggcctgcaagcaccgttccatttgccaattcttgcaacatagctgcagcaaaatcaagtgcttcaaggacagtatcgttattgatacctttttcaaaacgtgatgatgattctgaacgaaggttgagacggctacttgtcttacgaactgattttccatcaaaaacagcagcttcgagaacgacatttttagaattgttgtcaatttcagttgaagtaccacccataacacctgcgagagcaactggtttgtcagcaactgtaataacaatatcttcagcagtcaattcacgttcttcaccatcgagagtgactaatttttccccatcacgggcatcacgagcaacgatacgtgaatcttcaaatttatccaaatcgaaggcgtgcattggttgtccaaagtaaagaagaacatagtttgtcacgtcaaccacgttgttgattggacggataccagcattcataagaaggttttgcaaccattgtggacttggttgaacagtaacattctcaaccacacgactagcataagtagccactttatcactttcgatggctactgaaatcttatcagaagctggtttgctgtcttcagtaaccgttttttctgggaagtgaacagattttccatagattgcagcaacttcatgtgccacaccacgcatagaaagagcatccgcacggttaggtgtgattgacaattcgatgatttcatcatcaaggtcaagatatgggaaaatgctatcgccaggaacggcatcttctggcaaaatttggataccatccgcaaattccttaggaataatgctatctggaagtccaagctctgccaaagaacagatcatcccgagagattccatgccgcgaatcttaccttttttgattttgtaattgtctgcaatacgggcaccaggaatggcaacaattaccttgatgccagcagtgacatttggagcaccacaaacaatttgacgtggaccttcagcatctcctgtatctacttgacacaagtgcaagtgtgtttcaggcacatcttcacatgacaagacatgaccaacaaccaattttgacaagccttcggcaggtgtctcaacaccttccacttcaatacctgtcgtcgacattttttcagcgagttcagcagtggtaacatccacatcaaccaactcttttaaccatttataactaactagcataattatgatattaagaccgtgtccttgcaaagcaaggaccaaagtgacaagattttaggaagtcgcctgaaatcctgatttcagtagcgacttatctaaatctcgaactttgaggtcgtattcaaatcctttctgtaaaattatcagttcaactgataaatgagagaagagttcaaacctctacttaagcgggttcaaatcctttctgtaatttaggaatatgtatatctgatataagaggaagacgaactaacacgtttaatcgccttttaaactcctctctatcaacttaataataggtttatagttttaatttaagcaaccagtcgcggtcaactttaccatcaccaactggaaaatcgtgttctgcgaatttttcgaagccatatttatcgtaaaatatctgtgctttgaaattcctttcccaaacacccaaccaggcccaatcacaacctagatcacgagcttcttgtaaggcaaactcaaagagttgcttacccaagcccatgccttggaaggcctgactgatataaatacgttgaatttgaaaggcattatccaagtgctgctctgtttgagcagaacctacattggtctttagaaaacctgccttttcaccatcaacgagaatgaaaaagtaacgcgattcttcatgagtgatttcatctaagagaacttcctcagaaagtgcggtatcaaagtaaccttgcaactggtcttcggtattatcatgagcaaaagtctctctaaaggtatcttcggagataacttttaattctgctacttcttccggaagaaccttacgaataacgactgacatgacaacctcctaaaccttatttaaactgttctgagaaacgaacatccccttggtagaaaccacgaatgtcgttgataccataacgaagcatggcaatacgttcttgaccaagaccaaaggcgaaacctgaatattcttcagaatcgacaccagacatctcaagcacttgtgggtgaaccataccagcacccaggatctcaatccaacctgtcttcttacatacgttacatcctttaccaccacacttgaagcatgacacgtcaacctcaactgaaggctcagtgaatgggaagtaagatggacgcaaacggatttgacgttctgcaccaaacattttttggataatcatttcaagcgttcccttaagatcacccattgagatgtttttaccaacgaccaaaccttcgatttggtggaactggtgactgtgagtcgcatcatctgtatcacgacggaaaacacgtcctggtgagatcatcttaagtggacctttagaaaaatcgtgtttatcaagtgtacgagcttgaacaggacttgtgtgtgtacgaagcaaaatttcttccgtaatatagaaggtatcttgcatgtcacgggctgggtgatccttaggcaagttcatacgttcaaagttataatagtcagtctcaacttcaaaaccatcaacgatttggaagcccatccccaagaaaatgtcttcgatttcttcagctgtttggctaagaatatgacgattaccgagtttgacttggcgtccaggaagggttacgtcaagactttcagagtcaagttgtgcttgaattttagcagcttcaacaactttagcggcttcgtcaaaagcttcagtcaaaacgtcacgaacttcgttgaccattttaccaactttagggcgttcttcattaggaaggtctttaagccccttcaaaagatccgtcaaagagccttttttacccaaaaatgcaacacgcaattcttgtaattctttagagtgttcaccacgcatttcagccaatttagcctgcgctgatgttttcaactcttgcaattgtgtttgtaaatccatgagattcctttctgatgtaacaatttcgaatcgcaaacaaaaaaccacatgccaaaactccaacccggagcgttgacacgcggtaccatccgttttttatctggttacccagaccttgattcgtcagtcgttttcatgagtgaattcgccgaacttcccttgaggaggcttccagtccatgacctccaatccctgtcaatttccataaggttactagtctctacgacttctattcaattactatcaattttaccaaaaaaacaaaaagctttcaagagctgacaaagaatcctttagttaatgccaaaatggaaaatatgtctaagataattgacatacctatataaatttgctacaattatgtcagatatagttgacataattgataaattgcgacttacagcaacacattagcttgtctttcagaaggaggcccattatgaatcatgtcagggaatttagaaagaatttagggctttcgcaattagaacttgcaaagtctattggtgtttcccgacagaccattaacatgattgagaataacaagtataacccaacacttgagctctgtcttaatctagctaaagcactagatactgatcttaacagtctcttttgggatggaaattgcgaatagaaatataagatagaaagaggtaaattatggttaaagaaactttcactgataaactaatcaaacgtttttacggtattactggacctttagatgaacaaaagcgccaacaggttgatcgaatgggtaacatggctttcgttgttctcttctatattttaatttttggtaattgtattgcctttcttctaagctctaagtatcccgaacttgtggctcgtatttatcctgttctacttttgattatcattctggtagttagtagcatccttacttataagtttaagatgagtgctgttaacgctattgacgaggaagaactgactgagaaagagaaaaaacaacttaagcacgtggggcttaagtcaggtttattctttggcgtttttatgttcttaggcatgcccctgattcaattactagttaatcataaagactatttgacagaattattctcagtccgaaatatcctgtcaggcatttttgaggctatcctttttggggctatcatgcaacgctttgtaaatgctcgtatcaaacaagccaaatctcaagctgataaagatgaccaataaactcaaaaagacaaagaaaaaatccaggtttcccagcctggattttttgcttgaaagaagacttcttagacttgtatacgcgaagcctaaatgtgtccagaaaatcgtatcttaacacatacactataactaacttcaaaaaacaccatatccccatatgacatttccttaaatattgtaacatgtcagtgcaaaatgacaagtcaccctctctctcataaaccctaaaatcctaatcatagcccttgttatgccattttacgcaatcgattgcgtaattttgaaagcgcaaacttaattattttctgaaagtccttacaaattttttgagactatgaaaaaagatagtgataaagctatcaactatctttcatgaaaatataatctatttttagtctaaatcaaggtcttttagtttgaccgaaacgattttcgagacacctgattcctgcatagttaccccataaatagagtctgctgcagacatcgttcccttacgatgggtaactacaataaattgactagacttgtcaaaacgattaaggtagtcaccgaagcgtttaacattggcttcatccaaagccgcttctacttcgtctaggataacaaatggaatggttttaacacgaatgatggcaaagagaagggccagagctgacaaggccttctcaccaccagacataaggttaagcgattgaattttcttacctggtggctgcacagaaatttctaccccagcctctaggagattgtctgaggtcaaaatcaagtctgctgaacctccaccaaacatctgggtaaaggtctgtttaaagctttctcggatagcctcaaaggttgctttaaagcgtgatttcacttcatcatccatgtcatttatggtattcagaaggaggctcttagcttcgagcaaatcatccttttgtccgttcaagaaatcaagacgttgcttaacctcttcaaactgggcaatagcatctacattgaccggacccaaagctttaatcgaacgctcaagaccttgcaaattctggcgagtttgttcgacattgtcaagagggctggcctgacctttagcgacttcaagtgtcatctggtaatcttcagctaactgagtcgcaaacttacgaagtgattgactaatctgactttcacgttcttccaagcgagtctgctgacgaatcaagtcctcgttacgattaccagctttagccaaacgctcctccaagtcttccaactgaccttcgtaatcttgcacctgaatcttggcacggacaagagcttgttccaaatcgtccttacgttggacagcttctttatgctgtgcttgcaaatgcggaaggcggtcagtttggtcatcattgacctgattgttaaggagcgctttaagattatccgattccttcattaactcagataagtcgacttgaagacgattactttctgtcttagcaaaacgcaattctgcttgcaaatcacgttccttcaactgaagttctgattgcttgtctaagagaacctgtttttgttggccaagagcgtctttgtcctccttaatagcctcaatacggtcgttaatggcctcacgcttggaagcaatttgtgctaactctgctttaagttgttcagccttatcttgaagatttgccccttcagttccctgagaatcctgtttgaaactatccactagggtttgatttttctccacctctgccaaggcttgttggtgttctaggtctagtttttgctcctgaagacgagcattttcaccatctaccttaaggtcttctagctctttctgtagagtcttacgtttggtcttaagggattcaactttagcctcactatcacttaattgagccttaatctggttaatttcagcagtcaatgcatccagttcaggcttgataaagagactattattttgcttattagcaccacctgcaaaggcaccaccgggacgaatctcagacccgtcaagagtaaccatacgtacttggaaacgaacagctcgagccgccttgttggcattatcaatggtatcaaagattgctgtcacccctaggaggttttggaaaatattagataagcggtcctcataggtaaccaaatcggaagccataccaataaagcctggtgcattggcaagactttgagcaaattgtccgttaagttgacgtggtttaatagtggtcaacggcaagaaggtcgcacgcccctgacgattgcgcttcaagtagtcaatcgaacgcttagcagccgcttcgtcctccacaataatattttgcccactagctcccatagcaatttcaagagccgtctgataacgcgtatcaaaagtcaagtgttcactaactgcaccaataattccttgaatggattgggcgttttgaaggacagccttaacccctgcatagaaattagaatgatttttttgaatagactctaaactttgacgacgggcatctttactcttaaggtgatccatgaggtcaaacatctgcttttgagcctcttgatagtccttatcaatagcttgataagcctgagccttttctttgtagttagctaggaggctttgaagactctctttggctgcttgataagctttttgggcttcgctagctatttcctgagcggagagcaagtctgcctgagcttgtttatattcttcagcttgagcttccaatgcttgggtctgactatccatgtcgtgggtaacctgagtcaaactgttggaaaccttggcttcctcctgcatcagaccaacatagtcctcacgtaaacgttcaataagcgtatccgggtcatcagaaaattgctccagttctttttgaatagcaatcagctccttggcaaggctatccaactcagcattcaattcaacttggccttgattaaccttatcgagtgctgcctgagcttcttctttcaaatgctctaactcactgagacgagcttctgtttcctcttttttctctgaacgctgctgactctccatggtataaagatcaatttgacgctcaaagtcactaataagacgtgtgacatccaccaaggtttgttggtcagaagaaatttgttctgaaatttgatgtcgtttctgtttgagctcctggttctcagtctctaggcgatggcgttcctcataatagctggttaatttttcctttaccgctgccaaatcctcttgggtctggctcaagtcggatttaccaacttcaatatcgtggaccaaaagattaagctgagtctgtctacgttcctcatctaattccaagtaacgtttagcagtcgctgcttgcttttcaagcggtttaacctgaccgtccagctcgtagatgatatcttccaaacgatcaaggttatcttgggtttgattaagcttactttccgtttctttcttacgtgtcttatatttaagaacccctgcggcttcttcgaaaatagcgcgacgctcttcaggtttggcattaaaaatagcctcaacacgaccttgggaaataatggaaaaagaatcacgccctaaacctgtgtccatgaagaggtcatgaatatcacgcagacgaaccttgcgaccatcaatcaagtaatcattgtcaccgtttcgataaatgtgacgctccacacgaatggtttcaccagcacccgcgataaagccatcactgttatcaagagtgaccgccacttccgcatagttgagagccttacgaacctctgtccccgcaaaaataacgtcaggcatcttgcccccacgcaagctcttggcagatgattcaccaagtgcccagcgtagactttctgtaatatttgattttcccgatccatttggacctacaacggctgttactcccttgtcaaagacgacttgtgtcttatccgcaaaggatttaaagccctgcatttcaattgatttcaaatacatgcttaatttcctagttgttcaagggcagccttagccgctgcctgttcagctaatttcttagattttccaagacctgtgctgagttccttaccatcaacagctacctgcatagtaaattctttagcatgagctggtccagactcgtcgataacggtataagtaatatcaaccgtaccattgacctgaagacgctcttgcaaggctgtcttatagtctgttacgcggtcaaagttccccttttcaacctgaggaatcatgacctgattcaagaatttctcaacagcaggcaacccttgatccagataaagggcaccgaggaaggcctcccagaggtcaccaaggatagtggcacgttcacgtccaccagatttttcttcccctttaccaagacggatatactgctcgaaaccgcaagcctttgtaaaacctgctaagctctcttcacgaacgatagtactacgcatcttagacatttccccctctggcttattagggtagcgtttgtatagataaacagaaatgactaattgcagagccgcgtctcctaaaaattccaaacgttcattatgtgaaatgtttaggaggcggtgctcattggcatatgaggtatgggtaaatgctgtttctaagagctctttttggctaaaaacaataccaaaatcctgctcaagtttttgttcaagttgattcataaaacttcctttctttttaagcacactaactctaattatatcaaaaaaagcaaattttcatgatagaaaactgcttttagagcctatatccgctgatttttgtgagatttaacctattcgactaaaaaaagctgagcaagctgctcaacttcattttcttaataatctggacgaacaacacctgtaactgtctcacgtgttgcttcgacatcttcttcaaggacaaccttgatgatacgtttggcttcttctgaagtacatgcaaccaatggcaaacgaagtggtccaacttcaaaaccaagatggttaagaacagccttgacaggtgcaggacttggtactgagaagagagcgttaactttaggaataaatttacgttggatagttgctgctgtcttgaggtcactattttcaatagcttcaagcatggcatgcatctcatcaccatttgtatgagaggctactgagataacaccgttagctccaaggttcatagcgtggaaggcatccccatcttcaccggtataaaccaagaaatcttctggtttatgttcgataaggtaggccatattagcaaggctggtacattctttaaccccgataatatttggatgttcagccaaacgaagcatggtatcaggagccatttcaacaaccacacgaccagggatgttgtagatgataattggcaaatcagaagcatctgcaatagctttgaagtgttggtacataccttcttgtgatggcttgttgtagtaaggcacgatagcaagaccagctgcaaaaccaccaaatttggcaacttctttggcaaactcgatagagtctcgtgtatcgttggtaccgacaccagcaattaatggcacacgtccattaacgattttctgaacagccgcaaagagttccaactcctcatcgtgagtaagtgttggactttcagctgttgtccccgccaaaagaagagcttctgtatggtgagccaaaagatgctcaatcaattctggaagcgcatcataattgatagagccatcttcgtggaaaggtgtaataagggctgtgatcagtttgacatctcttaattgatcaattgacataatattctccttcaaccgttttctaatcctttccattttaccataattttgaccagacagacagataagttaacaattttctgaaaacgtgagaactgactgtttcaatatgatagtcaaaacacaaaaaaacagagagaagtctctctgctttataggattcagcttgaatttagtatttgaatacaaaactaaatccttactgattcctgaatcataacgcagtgattgattggaactactcatgtctacaacattcgtacttcctaatcaactgtgcgggggttggtataaaagcgaaggagaaatcaaactcttcgagttactgatttctgtttcgctccctatttcaattcaaatttcaattctgaagttgggcgaaccaagccgcgttcgtgaagtgtttctgcgatttgtactgagttccaagcggcacctttaaggaggttatctgaaacaacccacatgtggatacctttttcagcatccaagtctttacggatacgtccgacaaatgtatcacgtgaacctacagcattaacggcttgtgggtagacttggttagcaacgtcatcttcaaggactgcacctgggaattctgcaatagcagctttcacttcgtcaattggtgccacttcttttgtttcaatgtaaactgactctgagtgagctgacaagactggaatacgtacacatgttgctgatacggcaatgctatcgtcttccatgattttcttagtttcgtttgtcatcttcatttcttcgtaagtgtagtcattttcagtgaagacgtcgatttgagccaaagcattgaaggcgattgggaagtgtttcttatcgccaccacatggcaagatttcagctttaacatcacgtgggttaacgccgtcattcaaaacttctttcaactcacgttgtgtttcaaggattgctcccataccagcacctgatacggcttggtaagttgacacgatgatacggtccaagccccatttttgacgaactggctcaagggcaaccatcatttgaatcgttgaacagttagggcaagcgataataccgttgtgagcatcaagcgcatgtgcattgacctcaggtacaaccaatggtacatctgggttttgacggaagtatgatgtattatcaacgactactgcaccagctttaacggcgtatggtgcatatttagcagaggtagatccaccagctgagaaaagtgcaatatctacaccttcaaatgcgtcttcagtcgtttcttcgatggtcacgtcttggcctttaaattgcaagactttgcctgcagaacgagcagacgcaaggtagcgaatgttatcgattggaagtgttgattcttccaacattttaatcatttgagcaccgacggcacctgtagcaccgacaacagcaactgtgtatcccatagtaaaacctctttcggaattttctatcaatttagtttagtgaatctattatactacgtttaagcccagttgaaaagggttaaaaggccaagaataaagaaaagcccctaccaaatggtaagggataggaggcatctttcgatgagagtagcaggttcacacaactactcaaggtccgctcctgcgttacaatctaatgtagacctcctcagcgcaaaaggctccaaagagccaatcgactcatcgcatgtttctattctagcatattgaacgacagagtcaagctcttgatttctataaatacttacttgcctcacgaatgctaagagatgccatttgactagcatgttgatcaataaaagcccgaacccaatcaggatttacctttgagtaattgcgcaaactccaaccgatagccttattaatgaaaaactctgtctgcccaaagttgttacagataacctctgctaggagagcagtatctgtcaaatctttacgcataagctggtggtcaatggcaatacgtctcaaccaaaaatcctcatcaagactccattggcgcatgatattcttggtttctggatagtgaaaagtaacctctccgatgataaggtccaattgatctatactgtcccaccatgatttggtttgagccaattcctttagctttggaaaatcttcaggtctaagctccttcttctttttatccagataatccatagcaatatattgaaactcacggtaaggttgctgccaacactcttccacaaaagtccaatcaattggattttttatgaaaggcttaaaaaactctctttcaatctttttgagaattggtttttgaacgccaagaaagctgaatttatttttcatataagcttccattgctgggactttcgttgaatcagcttggtcttctaacaatttcaaaagaatgtttgtatccatatgatttcttcttttttacatcaatggtccaatcagagaaaagagatagccacctagacgatgtgctataggcatttttgacaaactttccagagtgacttcctctgagagcgcctgggttttctcaaaatcttgttctatgttaagcacttccagatttttatagagatagaccccatcttcaaaattttgatagagactccggtaatcagtgttaatggtacctaccacagcttgtttggcgtcagaaacataaactttagcatggacaaagcctggggtataacggaaaatacggacgccagcatccaagaggactttaaaataggtcgtcgcaatatcaaaggcatactgtttatctggaatccctggcataatgatacgaacatctacacctcgtctggccgcaaaggtcatggctctgaccaattcatcatccaaaatcagataaggcgtcatgatatagacataattagttgatgtattcagaagatgtaaataaacattttcggcaaccttgtggtaggtcagcggtgaattgccataagggagtacaaagccctgactctttctttgttgaggtttttcttgtagatagtgctccatatccgttttatcttctattccagtcactgtccacatggtcaaaaagagagcttttagcgtttgaactgctgaaccatctaagcgaagggccgtgtccttccaatggccaaagcgttctcgtttattaacatactcgtcagcgatattaacgccaccagtataagcaacttgaccatcaatcactgttatttttcggtggtctcgatagttgtaataggtcgataaaactggcttaattggcgagaaggtctgagctttaataccaaccttgtgtaacctctcgatataatcgtaggataaggtggtcatctcattcatcccatcaaacataacacgaacgtccagtcctgccttagccttctcctccaagatggctaatatctctccccacatgatgccttcatcaatgatgaaatactccataaagatataacgctctgcctttttcagatcctccaacaaggccggaagcatatcatctccaagttggaaataagtcactttagtatctctataaattggaaaatgagcaggactatgctccagaaaataagccagtctttgcagttgcctatcgctatgaggcagatagtcctcaacctctggctcggtagccaaatagtcggaagtttgctgagtagcttccacaagacgctttttcaaacgtctgacaccaaaatcagctagcgaaaaatagagcaaggcggtcccaaaaatgggaaagagggcaatgatgatcaaccaagaaagtttggaacgggagtccatggaacgattgagcaaatataaaaaggtaaaaacactcaataagtgttcccataagataatggatgggaaatgctcttgtaggctaatatatgaaaagacaagaaaggccaattctagtaagaaaaacaggaaaataggtaccttacgattaagtagaattttagcccatttagacggcttctgaggcaatagccgggcacttatttcttgggacatataggctcctttagtacaaagaaattagctcacagttcagagctttttctacgatttttcaattattagtatcattctggcgtgggcaaatgacacaatcaatttgtcgactttgactagacatttctagcctcctaccgtattttcctgacaggaccatctaaggtcttttgcatccagacaatatcatgccattgctcaaacttgtagcccacttttggaaaatgagcaacttggacataaccacgtttttcatgcatagcaatgctagcctcgttcggaacagcaatacaggctaagaatcgcaaaaagccccgttgttcaagttcctcttcaagagcatcatagagctgacttcccagacctcgaccacgggcatcttcatgcaaatagatggacaattcagttgtccaattataagctgtccgggcatagtaggttgaagcataggcatatccgagaacttgtccatcctcttcagcgaccagataagggtaagtttcaagggttttattgatacgattctcaaattcttgaacactgggaacttcatattcaaaggtaatggccgtcttctcaacatagggtgcatagatgacctgaatagcttgtgcatcagccaagttggctggacgaatggttaacatcattttctccttcgacttcattatctttattttatactataaaaaaagagggctcaaccctcttcttacaaaaattgacattacatcaatggcgccactagtttggtcaataagcctaaggccttttgatggaatggaagtttttcaacgtcagtcgtgctgactcggtgacactggtcttttgtcgcttggaaatcttcctcaatagcaagaaccgaagaagtcctatagagataggtcgcacactcaaaatgatgatatagacttcggtaatctaaattaatcgttcctacaacagcccgactattatcacttacaaagatcttggcatgaataaatccaggtgtgtactcatagattttaacgccagaggctagcagtgttgggtagtaggtcttagctaggtagtaagctgattttttatcaggaataccaggcatgatgatactaacgtctaccccacgctcagccgcaaacttgagagcatggagtagttcaccatccaaaataagataaggtgtcatgatatgaacaaaatcacgcgcatggttaaggatgtcaatatagacattctcaccaactttatccttgtccaatggaatatccccataaggaacaacaaagccaggggtatcaaacgccttatgttcaaccatatacggcgtaacatctaaagtttcgttagaataggtccacatctgaagaaagagaactaaaaaagtatcaaccgctgggccctccagcatcaaggcagtatctttccaatgaccgaaacgctcaatcttgttgatatactcgtcagctaaattaaccccgcctgtgaaagcaaccttaccatcaatcagcaagattttcctatggtcacggtaattgtaataggttgacaggaaaggggttaccgatgcaaaaactcgagattgaatgccaattttttccaatcgtttcttatagtcaaaactcaaagttgaaaattcattcataccgtcatacaggactcgaacttccaccccttcttgaaccttttgtttcaagattgctaggatttcaccccacatttcaccttcaccaatgatgaaatattccaagaaaatgtacttctctgctttaaggagctgtttcttcatttcctcaaacttggcttcaccacttgggaaataggtcgtcttcgtgtcacgataaactggaaaggaaccgttcacattttcaagatattggaccaagttatagttgctggtgtgacgctgtttaagctcttcgagggcctgattatcttgtttcagaataccagaactgcggtcaatattgctctgaatagcacgcttcatccctgtgtaacctatatcaagtttcgtataagccaagagcaaagttccgataatagggaaaggcaagactatcaggagccatgtatttacagccgtcgactccatatcactttgaaagagataaataatggccagaatacgaaggactacttctgtaacttgcaggtgtatcctatattgatgcaaccagaggtaagacatggccacaacaacaagctgcagtaagatgattaagaagataatcgtagcacgactaaagattccacgaagaaagccacgacgactcttatcataaagacgttcaattttagcttcgtttttgatagcatgactcctttccctttttaattaatcttattataaccaaatttgtaaaattaagcaagacagaaaaagccatctatgttaggctcagataaacaccacatttatctgaaagaaactaacataaatgacctatgctcatcttaccacaaacgatcttgtaatgatagaggcttattatcaagaaaacataaaagttttagatattgtgacttcacttggcagatcaaaacagacaatctacaatgtcatcaactatctgaaagaggggcactctgcttatgattactataaccgatataaaatcaataagaaacgctgtggcaggaataaaaccagtcttacgcaaacagaaaaagattttatccaaactcatttagtacaaaattggagccttgatgtcattaaaggaacttatccagatagagtttcttgttctatgagaactctctatcgactagcagaccgtggtattctaaagaaagaggatctcccttggaaaggcaaaagaaaaccaaatggtcatagcgaaaaacgaggaaaacaagtgttgctcagagatttacgtgagagagcagacagttatcctaattttaagacggaattcggtcatctagaaggggatacaattgtgggagaaaaacacaaaaatgcagtcattaccttagtagaacgctgctcaaaagccatcatcacactgaaaaccaatggacggaaagcaagtgatattgaggcctccatcaatcaatggttgtctcaagtttccagtcatctctttaagtcgataacttttgattgtgggaaagaattttctaattggaaatctatttcgaatgcacatgacattgatagtttctttgcggatccaggatgtcctggtcaacgaggtctcaatgaacattctaatggcttattaagacgaaatggattaccgaaacaaatggattttactaatatttctcaaaattatgaggctgggacaaaagtcctagcctctcaatttgtctttggattgtcgagaaagacgcagtggttgagtgggctctactacgctgatttcatcagcttttacagccctactcaactgtgcggaggtgggacgacgaaatcgaattctaacgaattaccgatttctgtcccactctcaagaaatagaattcctaggaaatcattgaattatcaatcaccctaccaagtttttctgagttacttgaaaagtctaacttaatttgacaatttaggttcttaaacgtctctcgttaatcaactaaaaattataactagctgggtgttatccaatctcccctcactattaagtttttatcatttttgatataatggtagagaatgaaaggagactttatgtcaactaaaaatttatccccggtcttaaaaacatcttttgtgctactggctatcctggtccttcttggtattgttatgcctgacggctaccaagtttggtcagaacaactgagggaagttatttcagataaatttggctggttttacttattactggtcacgtcaatcgttctactttgtggctttttcctggttagtcccgttgggcaaatcaaacttggggaacccaattcggtgcctgaacactctaccatctcttggattgccatgatattttctgctggaatgggaatcggccttgtcttctacggtgccgcagagcccttatcccattatgccatttcaacggtacgagctaccccagggtcgcaagaagccttagccgatgctttccgttacactttctttcactggggcatccatgcctgggcagtatatgctttaatcgccctggccctcgcctactttggtttccgaaaaaaagagaaatatcttttatcggttaccttaaagcccttgtttggtaaaaaaacaaacggtatccttggtaagatcgtagatacgattacagtggtcgctactgttatcggggtggcaaccactcttggttttggggcagcccaaatcaatgggggactcaactacctctttggtattccaaacaatgcccttgtgcaagttattatcataattatcacaaccatcctctttaccatttcagccctttctggtcttggaaaaggggtaaaaatcttatcaaacaccaatcttattttagcggttggactactcgccatcaccataatcatcggtcccacagtccagatttttaataccttgaccgatagtatcggactgtatatttccaatttcttccgtatgagtttcagtgctggttcctttggtcaatacaatcgtgactggatcaatacttggactattttctattgggcttggtggatttcttggtcaccattcgtgggagtttttattgccagaatttctaaaggacgtagtatcagacaatttctatccatcgtcttattagcaccgactgtattaagctttttatggttttctacctttggaacactttcaacgcatgttcaatcacttggaaatgtagatttaacacagtttccaagtgagcagaccttgtttgcaaccttcagtcaactgccatttggttttattgcctccgttgttgccatcatcttgatcattaccttctttatcacgtcagcagactctgcgacctatgtgctagctatgctctctgatgatgggaatctcaaaccaaagaataaccttaaaatcttctggggcgtactccttgcgactattgccatcgtcttacttctttcagggggcttagtagccttgcaaaatacgctgattatcgtagcctttccattttcactcatcatggtactgatcatggtttccctagtcattgaattgctacacgaaaaagacaagatgggactgtcaatcacaccgacacgataccctaaaaaagatcaacccttcaaatcttatgaagaataaataacccaatttgtaaaacgaagctagacagaaaaagccatctatgttaggctcagataaacaccacatttgtctgaaaggaactaagataaatgacctatactcatcttaccacaaacgagcttgtaacgatagaggcttactatcaagaaaacataataaaaattaatataaaaagtttctaaaatacatatttagacactttttgtatgctataattttcattaacactataacaaaggagaaccaaatgaaacgtttaaatactctatttcatattataaaagttacaggttttaatcaatttttgacaagttttgtaagttttatttttatttcaggaggaatacttttattagttgaacctcaaataagtaattactgggatggactatggtatgcttttgtcacatcaacaacagtaggttacggagatatactagctactactctaatcggacgtattactagcgtctttttaactgtatatggacttattttttttggatgcttatcagccgtaattgtcaattactacagcaaattaaatacacctaataataaaactgactaacatatttcttagtaactgtaaaaaataattctttctctgccaattccaaacggctacaatttcctgacctcgcgatacttcttgactatcctctccagtctgaacaagattaccatcttcgacatcatctaagtctaattctttcttgatagtcttgaagagttttccaaatccaatctgtcgtttccgataaagtccctcaaacaaatcacccgttatccgttccttcgtctcttcaggcaagacaatcacttgtttgtcattctctttctcgacatcaaatggattttactaatatttctcaaaattatgaggctgggacaaaagtcctagcctctttattgtttttggattgtcgagcaagacgcagtggttgagtgggctctactacgctgatttcatcagcttttactgccctactcaactgtgcggaggtgggacgacgaaatcgaattctaacgaattaccgatttctgtcccactctcaagaaatagaattcctaggaaatcattgaattatcaatcaccctaccaagtttttctgagttacttgaaaagtctaacttaattgttatcatttaatttatctaacagagcctctgctactttttctggaatgccaagggaatggatatcctcaacagtagctttttggatagctgtcatagacttgaagtgtttgaggagtttttgtttgcgcttaggtcctaacccctccacgccatcaagtttagaactgaaactattcttactacggacttgacgatggaaggtgatggcaaagcggtgaacttcatcctgaatgcggtgaaggaggaaaaactcctcggattgacgtggcaaatcaatgactcgcaaaggatccccaaagagcaattcattggtttggtgcttgtcatttttctgaagacctgcaactgggatagatagattcagctcattacgaaggacgtccttggcgacattgacctgaccttgaccaccatccatgataatgaggtctggtggcgttaaaccatctcgtttgacacgactatagcgacgacgaatgacctcacgcatactggcataatcatcagggccttcaacagtcttaatcttatatttgcggtactcttttttattaggtttaccattttcaaagacaaccatggcagagacagggctagttcccatgatattagagttatcgaaagactcgatacggaccggtgtcggaatccccatgagtttgcctagattttcaatagctccttgggtcttagccaagtctttttcgaggagatcaaatttttgggtcaaactgactcgggcatttttcgtcgccagattaaccaactgctttttctcgcctctttgtggtttaaaaaccttgacttcatctccgaccagagcttcgacagactcttgatcaatgtctccaggaataaaaatttccctaggcttgagatgccgactatccaggtaaaattgacccatataagttagaaaatcttcctcagcatcattataatatgggaacatattgacatcacgctgaatgagtttcccttggcgaacaaagaaaacctgaacacacatccaccccttgtccacgtagtaaccgaagatatcacggtcctgcatgtcctgacggataaccctttgcttagtcctgagcgtcgatactgcctcaatcaaatcacgatactccgcagcacgctcaaactccatctggtcagacatatccttcatcttggccttaagctgattaacgattttatcatcatgaccgtttaggaaattcttgacatcctcaaccaaaccttgccaatagtcttcagtggtgtgacagatggtatgggcattacattggccaatatggtaatagaaacagaccttgttggcgggatttttacatttcttaaaggggaaaatacggtccaaaagcttcttaatttcattagctgcaccagagtctgggtaaggaccaaaatagagaccgccatccttcttaacctggcgagtaatcatgagccttggatagagctccttagtaatcttgataaatggataagacttgtcatccttgaggcggatgttgaatttaggcatattctcttggataagattaatttccaaaagcaaggcctcaatattggactcggttacgataaattcaaaatctgcaatctcagataccaaaagctctgtcttggtatcatggcttccacgaaaatagctacgcacacgattttttagatttttagccttaccgacatagataatattgccgaatttatccttgtggagatagcaccccggattgtttgggagcaattccagcttatgtttaatcagatcattcatgctttcattgtagcaaaaaaagagctgaaaagctcttaatagtcatgggtgaatacaattttgaaaagtggcctatttgctcaaaatcgtcaaaatttcttggtagtttttgacttgataggttggaatagctggagtctcattaaccaaaccttttggattaaaccaaatgctgtcaattcctgcattatttccaccttggatatctgcagttagactatcaccaatcatgagggctgaatcgggatgaaagtcattcacctgatccgcaattttttcaaaaaagtccgtagacggtttgtgggcacccacttcatctgaaatgaaaatatcgtcgaagaaaggcaagatgcttgaggcttgcagacgaccacgttggatgtagctaacaccattagttgctgcataaatcttgtgaccgcgatttttaacgttcgataagaaggcatgggcctgaggcaactcctgcccctgttggctcaagaaatgctggtaacggccagctaagtgactgccatcaatctcctgtccaaaatgctcaaaaagacgagaaaagcgcgtgcgaagcaattctggcttagtgattaaaccatgattgaggtcttcccacatggaacggttcatgggaatatagtgatccttgtaaactttaagatctcgtgaagccaccccagcctcttcaagaaggtaggtcaaagccaaatcttcagcacggtcaaaatctaggagggtgtggtcaaggtcgaaaagtaaatgagtgtaggtcatggtatgtcctttctaactggaaatctttaggctctattttaccacatctagctatatataaataaagaaacacaaaaggacgacccgcaggccgccctctcagatttatgaaaaataagtattgcttacttaatagactgctattatatccattgaaccttaaagaaaacttaaagtcggttgttttttactattcctatagatttttacttaaacagcgaatctctctaattcgtggtatactgaaaatacaagattaatcaaacgaggcgtgttatgaaaaatataaaatttcaatccgtttttgacatcatcggacctgtcatggtcgggccttcctctagtcatactgcaggagctgttcgtattggcaagattgtttctgccatctttggcgagacaccgactgaggtagaatttcaactttttaattcctttgccaaaacctatcgaggtcacgggactgatgtggctctagtggctggtattttaggtatggaaacggacgaccctgacattccacgcgctctggatatcgcatacgaaaaaggcattaaggtctactggaaaatcaacaaggatagtaatgcgccacatcccaatacgactcgtattaccttaaaaaatgataaaaaaaccatttctgccacaggtgtttctatcggcggagggaatatccaagtaactgaactcaatggttttgcggtcaatctcaagatgaatacaccgactcttatcattgtccaccaagacgttccaggaatgatcgcccttgtcacagatattttgtcgcgttatggcatcaacatcgcccaaatgactgttactagggaaaatgctggtgaaaaggccattatgattatcgaagttgactcgcaccagtgtgatgaggccgtcactgaaatcgctagaattcctcatctacataatgtcaattttttcagctaagagggggattgcatgttttacactattgaagaattagttcaacaagccgaccgagattaccaaggcaatatcgccgagctcatgattgctacagaaacagagctaactggacgggaacgtcctgaaattctagctctgatggctcgaaatcttgaagtgatgaaggagtctgttcaggctggtttgtcccctgagaaatcaccaactggcttaaccgggggagacgctgccaaactagatgcctatatcaaaaaaggaaagaccttggctgattctgctgtcttaggagctgctagaaatgccatggccgtcaatgaatctaacgccaagatgggcttggtttgtgccacacctactgctggatctgctggctgtctgcctgctgttcttacaactgctatcgaaaaactgggcttaaccgaatcacaacaattggattttctcttcactgcaggtgcatttggcttagtcatcgcaaataatgcctcgatttctggtgccgagggtggctgccaagccgaagtcggttccgcctctgctatggctgctgctgctattacaatggctgctggtggtacacctttccaagccagccaggctatctgctttgtgcttaagaatatgttgggactcatttgcgaccctgtagccggattggttgaggtcccatgtgtcaaacgtaatgccatgggagcaagctttgccctagtagctgcggacatggccttggcaggcatcacatctgccattccagtcgatcaggttgttgacgcgatgtatcaggttggttcagccatgccaactgcctttcgggaaactgctgaaggtggcttagcagcaactccgaaaggaaaggcactcgcaaaagaaatttttggataatttttagtagaaacaaaaaaacttagaagcactcatacttctaagtttttttcttcttacatagccttttcaacgttttgattttagctgaataaccattttgtcaaaaagtgccatgtttctttggcaatacttgcaagaaaagttgagagactaaatgcgttgaattttttgaggaggttctcaacaagtgaagcgacagtcttaggtgtttccactggagccttactttcttcttgcttaccagtattatcctgagatggatctggcactgtgtttgtactgtcgtgaccattattttgtcctgtcggttcaggctctggagcaagctcaggctgatgctcaggttcatctgttttattttctggatttggctctggactaggttctggctgaggatcaggtttaattggttcgtcagtagtgtcactgcttgtgtttgtcattttttcagtaacgaagaagttttggaattctactgagccatcccaaagaccaacaccgacatgggcatgattgaagtaattatccacggcatcaaattgatgatggagcacttccttaccatcgacatagattgtcatggtgtctacgcctttctcaaccttgacatggtggtactggccatcattgatagccttatccaagtgagcttcagcgatggtttcaccaccaaaacggaagagacgaacagtgtcgttgtcagcaaattggacagagtaggcacgaccaggttcttcacgttccgcagctacaaagaggttgaccaaaccatgttggtatttgacatcgatatcatagtcaaattgcttgaagccattactttcataggccatgaagaagtcattggcactgacattgctatcgtaaagggtatcgtcatcaatataccaatcaccagtgacagctttcaaacctttaaggttggtcgcaaaattgttgagcgtaatgtcaatattaaaggtcttggtcaatgaagggttttcaactgaagttgctgtgacagtgagatgacctttgtgaagggctttgagagaaagtttattgtcatgttcagtataggacaccaaacttggatcacttactgtccatgtcacatcttgctcttcagaagccggtgcgaggtaaacctgcaagtccttactttgaccaacttcaagggccaaatgacccgcagccgtggtgttcatggcaacagccttagtaacttccttcttgtcagtccaagtactcttaattgggtagatagcaatatttgctttggctggaccaccttcaaccaagacactagcgccaacagctcttgggcttgggaaaatctgattagcaccagctaccgtattgcccttagcaaagacttccacactcgcacggtccacatatagatgcaaatcaatagaaccatcttcattgcgagtcacttgttgactattaaccttagcaaaagcatcagaaaggatagtaccagattgactacggtcaatagacaaagtttccttagttaaatcgtaaatgagcttagtagcttgaccatcaccaacgcgaaggttaaatccaactgctgtcgtgtccttacctggtacaaagtgggaaaccacttcatacgtgtcacctttgaaatctttaagcaattcattgtcagaagctactgtgacattttcaaaatactgggcattttctgtgtcacgaaggctttcgtaggccttaacaggtgtttgggttaaaaggtaacggtcgcctgatttaaccaaaccaaggtcaaggttaaggttaaaggtaccattaaatttttgacctacagtatctgcaaccagattgcaataatcttcccaagtgttcatccagttgatttcagtcaattgtgggatgtttggatggtcagctgttccaaaatcatgaacataataagtcatggcagcataggaatccttaccaaaattcatgatttcgtcatgatcttggtaaacctcatcagccacaaaggcccacttgccatccacttgtttaaaatcaccaaccttgtaagaacgaccgccacgtgagaggacccatttgagtgcaccatcattggccacaatcggataaaggtcaggacattccgtatgcaaatccttgtaggttgtttcaacttgccagttcttcaagtcttgtgaagaataaatgcggagtggaccacctgcaaggaccataaaccattggttattccagcggaaaaccttagggtcacggaaatcttggttttgaagtgggtcctgagaccagtcggcaaccaccttgtcatatttttgccaagttctaccctcgtcctcactataggcgatttcaatccgttgcccattaccatttgaagtgataatagctaccaggccaccttccggagatttgaagagacccgagctattggtactatcaaccacgacagagcctgagaacatgtgacctgtcgcatctgggtaaaaggctataggctcttcatcccaatgaagcaagtctcggctggtcgcatgggcccagtgcattggcccccatttggtatcatcgtaaaattgatagaagagatggtaacgtcccttgtaaaagaccaagccattagggtcattagcccagccatcctttacagaataatgatactgatcacgataaagctcgttgtaatacacatcatcactttgtctacggtggatattaacacgataagtcaaggtcacaggacggcctagtgaatcagtcatactactttcaataataaagtaattggcacctacagccactggcaattgtgaaatatctgtgtagacatttcccttggcatcctctaccttgataacagcatttggattatgcttagtaatgtcaaggcctactgtctcagcattgtgtcccacatattggatatggagtggttcttcagagaagaattgggcttgtttttcaacagaacctgtctttgaggtcaccacaagattgtcaatcaaaggaagactggcatcatcaagattaacatagcgggtgtttttgaaaatgacattggcattccaattaagaagtccaaagtaaccttctggaaggacttgaggttggcccttgtcacttttttgaagaacagcgtcacctgtacttgcgacaagcacatcattgacatagtaagatagccactgattagccgcaactactctaagattgtaggtttcatcggcagttggtgtcacatctttctcatctacaagttgaatatcatgattattgacccaacgccaaaacttaaccttatggttaccagagtctacattgaccccgtacatatttttatcgctactatcattgttaccacggaaaatgagggcagcggcaccaccagcttccttgaaggtcacatctgttgaatagataaaattcttgccctcggattgagaataaaggaaagagtctcccttgtctttggcttctgaatgaataccgtcagcctgcatttcccagtgaccattttggtctgcggtcatcccttcaagattggtaactgcttcattattaggcaaatccgttttttcctctgtcacatgaacaggactggtgctattcgttacaactggagattgttcttgattggtctgattcaaatcggcttcttgcgtttggttagttactttctcagcctcactagcctgtgtttgtacttcttttgactggtcagggctaggctgagtgggattctcttgagctgttttagcagattcggaaacaagagactggctcggctctaccacttgggggacttccttggtcgtgctaggtgcaagctccacttgaggggcaacttgatggtcagtttgagttaccacttcttgaggtgttgggctcacagttgcctgttccacttggtccgcatagacaggactagccagggccaaacctacaaaacttaccaaggcacaaccatagacccaagttttcccacttttacgcataaaccaatttttacaaacagtatcattcatgactcttctccttctttagagcaacattaaatgttaacttatttttcatgaaaattcaaagtcaatacattcgcctttattaataagcctatcaaagtttccggaaatatctctaggatttacattaaaacggtaaacgcttacttttaatatcattatagcactatcgtctgaaaatgtcgcatttttctataatatttttcatataaatgaaaaacttccgaatttgccattcgaaagtctcatactgatgcttaatctgagcctgttagcaggctatttccaataataccaatggttacaatagcaatcccaaagaatcccaaaaggctaggtagactatctccgaggaagaggcaaccacccaagagggtaaagagaacttcaccagcctgagtggcttcaaccactgccagttgcttatggttatgcttaactagattagtcgcctcgaagaaaagcaaggttgcgacaaccccagaaaagactgctacaattaaagactgtaaaatctgtccacctgatggaagcccagcatctgcaccagcaaaaactgacaaaagcaaccaaaaaggcgtactcatcaaggtcatcccaaacacgcgttgcgtcgttgaaagctgatcatgcttgcagtggaccatcatcttacgattacccaaaggataggcaaaagcggccagtaaaatcaagagactagcacggaccacaccgctaccaagaccactaccaaagtaaggaatctgaatgagaataatccctaaaaggataaccaatgtcataagcagttgcttaccaggtaccttctgcccaaagagtggggtcaagagcagaccagctagaatggtaatctgccaagtagccgccacaaaccatgactcgccataaatggacgctagagacaggggcccataaaaaagcccaaaaccaaccgtactccagaccaaccaggtcaagggtgctttcttaatggcagacaaaacacctgccagctcacccttacgccaggccaaaacagccagcataggcaagctaaacaaatagcgtagactagcactccacatccaggacccacctgaaaggttcatactacgattaaaaataaaagtaaaagcaaaaaagagggcacccagaataccataccaaagcgccctcgcaaattgagattgtttcataattgtaaactcctgtaattattctattgtacagtatttagagcaataaaaaaaggagttcatcataatgacttcctttaatcgtatacagttttccttaagaatcaagtaagcaacctgtatcttagtcacctcttagctgcacttgtgtatgtgctagcaggtctcctagatgtctcttatctttccgaaacatcgtcattgccagtaaggaaactgcgaggagagtcgccgaaatagagaggataatggacaatacatcaaaatcactatataagccatgaatcgtgcccatatgaccgagttgccaaggtaaaaatttaatggtatttctgatcaagctagcctgaactgtttttttctggtagaccagttgaagtcctgcttttgtcttcccaaaactcccattttttgcataatccaagaatgtgaaaaggagcgtgattggcaaaacagaggtgaaaaatacaagccactgcgactgcatttctgtaaactctgggacaccattaaaaaagatgatgtaaataagcatcgaacttaaaaacagaagaactaaataagctagaatgaaaagataatcaaagagaaattcaatcattctttttttaaacggaatagggtttattgctataattttcatcatcgtctccccctttctcatctcctattataacatttttaatattctaaataatatttgagaagaatatccgctggctagcgccctcgcaaattaagatgtttcataactgtaaacacctgtagattttattatacactacttctattatggcttttggactttatttcaattttacgttatattattattaaaaatctaaatcataaggaattatgtatgtcagaagatattaaaatcgagattggaaaaagaatccgtgaagaacgtgaacgtcaaggattaacacgtgagcacgtttgtgataccgaagaagaattaaccgtcaaacagttgatgagaatcgagcttggacgttctttaccaaccattgtcaaactgcaatacatcagtgataaattgggtgtttccctcaactatttgttaggtgaaacaaaactagacattcctgaagactattacaaggctaaatataaacttatgaagtctcctgtctatggtgacccggaacgtatcaagaaaaagctaaaagatattgaggaactctacgacaactatattgatgtgctaccagaggacgagcttttagctattgatatcattgaaagaacattaaatttcatagctgaaggggagggagaagatcttgttgaaatagtatttgaagattatttaaatcaagtattgaaaaaggaacagtacacattgaatgatcttttattgataaaatattattctgtacagtgccaatcatcttcatatgatgaatctatgatcgagaattttcgaaaaaaattgataaaacaaagattgcaaggagatgaattaaccaatgtggaactattgggagcattatcagctatagctgggatatatgttatgcaccatgaatacgaacatatgaagtctctcgtcgataagatgtatgaaatcatacattccattatgcaacactcatatcagccaggtataacaatgcttgaagcaaaatactatctcttctatgagaacaataaagataaagcaactgaactttacaaaatggctaccgtactagccgaagccttcggtgaccaagtcttcatcaaaaatcttaaaatggaaatgaaaaaagacttaaatacgaaataacaaatctaagtgacataaatgtccttttgattcgttatttttttgtttatactcattcatataatcaaataggagaaatcaagatatgacaaaccttatcgtagcaaaacagttgagcaaacaatttcaaaaatataaagcaatagaaaatctaaacttcacagttgaagaaggtgaaattctaggtttcttagggccatcaggttctggtaaaacgacaacaattaatatcttaacaggtcaactcactcctagtcagggagaaacttatattttaggcaaatcatcccttcagttaaaagaaaaagatttgtcaaagattggattaattactgaaaatagtggcttttatgaaaaattgacacttcatgacaatcttctattcttcgccaaactctacaatgtttcaccagattatattgacgatttgatgaaacgtgtaggtctttatgatcatcgtaaaaccttggcagaaaaactctctacagggatgaaacaacgaatgcttttagttagggctatcattaacaagccaaaagttctctttcttgatgaaccgacttctggtctagatccatcaacgtctcaaaccattcatgctcttattgaagaactaaaacaacaaggaacaaccatttttctgacgacacatgacatgcacgaggctaccattttatgcgataacattgtacttctaaataaagggaagattgttgaagaaggaaaacctgctgatcttattcagaaatataatacaaataaaacggtaaaagtgacctactgttcaggtcaagagaaagtgattcccttctctgaattaaatcatattactacaactcaagatattcaaaccatccattcatgtgaaccaactttagaagacatcttcatccaacttacaggaggaaaacttaatgtttaaccaattgaaatctttactatggcttagaaaacgagttatcaaatctaacaaaaccattatcctacaaatcctccttcctttaggatttgcctttctatataaacatatctatgagattcaaggtagtctaaacaactcaatgaaagtcaatctattaggcctgtgtttagccttatctttgagtttatcagttgggaatccaatcagtactattgtttccgaagaaaaggaaaaaaatattttaagaactttgtttttaagtggtgttaacagtacaaactatatcctttcagttttgttttacccagtgcttattagcttagtgatgacaactgctattccgagaatactagaactaaatattgaaaataattatggtgcttatcttatcatcttacttgctacatctttagtaatgatgcttatcaatcttttcattggcttaatcagcaaaactcaagtgtctgcccaagtaattagtcttccagtatcaatgattagtatgtttattccaatgctttcagggatcagtaaagatttcgataatgtcgtgaaatatagttatatgggacttttcacgaaatctataaaccagcttgaaacttttaagtggcaggaccaagtagcaagctcactatctctgctagcctggttgctcctctttactacactgaccattctacaatctaagagattacgaaaaatatcttaattcaaaaccataaccatctaaactgagtgttagatggttgttttgtttattccccctcttttgctctaactagaaacacagtcagcttcctagagtcttttcattcacatgattttaaggtatattattatataattaaaactcaaggggaatacagatgtctgatgatattaaaatcgagattggaaaaagaattcgtgaagaacgtgaacgacttggtttaacacgtgagcaagtttgtgatactgaagaagaattaactgtcaaacagctgatgagaattgagctcggtcgctcattaccaactattgtcaaactgcagtatatcagtgataaattaggagtttccctcaactatttgttaggtgaaacaaaactagacattcctgaagattattatcaggctaaatataaactcatgaagtctcctgtctatggcgacctcgaacgtatcaagaagaagctaaaagatattgaggaactctacgacaactatattgatattctaccagaagacgaacttctaaccattgatatcattgaaagaaccctgaattttatatctgaagagaagaaagaagatcttgttgagattgtatatgaagactatttgaaccaagtattaaaaaaagaagagtacaccttgaatgaccttctgctaataaaatactatacctttcaatgtcaagttggtgactatgatgaagaaattgttgaaagttttcgatgtaaattaattaatcaagaattacaaggggaagagctagttaatgttgaactactgggggcattgtcaactataggtggaatctatgtgatgcatcatgattatagaaatatgaaaactattgtcgataaaatgcatactattattgataagacgctacaacatgcttacaaacccgccgtactcatttttgaagcgaaatattatcttttctatgagaacaatagagataaagcgactgagctttataatacagctaccgtactagctgaagcttttggtgatcaagtcttcatcaaaaatcttaaaatggaaataaaaaaagatttaaacataaaatagaaaatatatcagcaatattttaaacgtgatttattctataaataatacctaccaaagaagcatctgaagttaaactcagatgcttcttttattatttcaattttttcacttaaactcgcccttatgcttcttcaaatacttcttcccataccattcttctactgacttgccttcccagtcccggtattcttcaggatacttccatttgtagaaaccttctaaaaagaagggcaactccatgaagataaccattgccaagaatccaatatctatgattatccatgtcaagaacatacctaacaaagtcattctttgcgagatggcgatgcccgtgtgcgataagattattttgatgattacagcaagccctagcactcctgaaccataggtggcgattaggcctgctattctatcaacaagagtttctctcgcctcttcaccaaaaaaacaaatgcttaaacttcttttctccatacgaaggaatattagggcagtgataaacaggagaatgtaaatgaaccatattccaactgaggttagggtagggagggctatagttattcccaaaagattgaattcaagaaagaaccaaatcaaaaaggtctcaacatgaaagcgaaatctgtatggtcgaagaaatggttttcgcacaaattttccaataagaacaagtgataaccaaataaaacaacaaataaggaataattcaggggtcaagagtgacggcttgtgaactggcagagttaaatccttaggctctgcaacatccaaagaagaggcaaatatggccaagagaaagttacatccgaatacaaacaaaatactgtagagaatactttttattctaaaaccaatacttggctttccattatttaagccttttccaagtttttcgtaatagtctttctttatatactgaagagaagcatcatctaatagatttaaactttcttcaaaactggctttaaagattgattttttcatttttaccttatcaatacttccttgtgctttttaggcacttccaattaatctttatttcgattggttaaatcataaagagcgagacagacctttttagttttctcagctagtgtagagtctgtgtttaactgagcctctagctattctctggacaaatcaggatctatcagcacgattgaaagaatgagataactctcaaaaagttcttatatttctgctttaattccgtctgactgattgcttctctagcatcctttatgacagcatcaaaatctcctgacctaaactttacgagtgccttgctctaccaactgagctaaattggctaacacttttatagtatagcactctcaattttttgtcaggaagttttaaacgattttctttatcaaaatctggcaaggattttggggatcccataattgaggaaaaatctctaattttttaaaaccaacacttcgataaaagacatttgttcggtcataatctttatttgaaccttctgcgactgttttgacctgtaggtagtccacttgtttgactgcttctctttctatagtcgtaattaattcccttccaattccttgaccttggaatgattttttcacgcctagacagtcaatttcagcacaatcttcactcgaatatgataaacttataaaccctactacatcactttcttgataagcagcccaaactcgtaaatccttggctccttcgatgtaggcttgcgtgctttcaggtattccaaaccattctggcaaatcctttaaaacctcatcaacaactgccattttttgatcttcatccttgacttcttcaattgtaaacatcataagttcctttcttgattttagtcttactttcccccttacgagccagcactttcgtaggcatccaagcccctatcccagagtttgagggaaatgaaaaagaaggcaagggaaatcagaatcaaaccaccgatattaaagagcccattcttaccctgcaagaaataactagcaggatagtaggccgtaaaggcgaaaggtacaataaagctaattaaccaacgaaggagcgaattgtaaatagaaataggatacttggcaaaatcattaaacatatagaaaatgtaaatcatggcacctgactgcttggtccaaaaagcgatgctggctgtcgcgatttttaaagaagtgtaaatcaaggtcgcaaaaggaatacaaactaggaaaagcaggaattttggaagcgtccaagcaatgcttgatactgttgttcctaatagaatgcaaccgaccaaaagttcccccaaggcatcaatctgaaaggtctcaacgaggatgtgaaagagaggattgataggacgagtcagatacttgtcaaactccccttttcgaactagccgttgacctaaagcccagagattgtcaaaaaagagatgatctaatcccttgggaatcaaggaaaatccatagataaaggcaatctcttgaaaagtccaaccttctagggatgggatatgttgaaagataacattgagaaacaagaggttcagaccttgagtcagaaagactcccaagacacctactacaaaatcaaccttgtattccatgatttgcttgatgtattgtctgataaaaatcagatgcatgcgttgatattttttcatactaacctccttgaatagtgataaatgactggactcgtttccaaatcaactgagacaagcccaccatcactataagccagaagaactggagcaaaagcgcttgaagaatctgactggcatcgtatttcccaacaatgatcataaccggagtgtaaatcaaggatgaaaaaggcaagaaggagagaatagctgaaaccacctttggaaagaaagccaagggaatcaaacttccagacataaaggccactatggaagtcttgagtagattggaaccccaaagatttttaaagacaaaggctgaaaatccaaagcagatgttaaagaaaaagttaatcagataagccagagttaagctaaagagataaaggacagttaatcccagcacttctacaataccttgcccagataagattttcatcaaaacaatgacacttaaaaatggcagtccaacagagataaaaatcaaccacttggagccaagttcggtgaaaaggtaagaggccgaaaaatgcactggcctcagcaagcgcatgataatggagccatccttgacctcctccccaatcataaaggagctatcagacctggtcaaaagattggtcacaaaactcatgatgatgtagagagtgatatctgccatactgaagccctgaatcaaaggctcctgggaggagtcaaagactgccttccagagataaaaggccacaaaagcccccatgacatcaccaatccgatagagaataaagttgactcgataggtaatcaactcctgaatccctgcattgataaagggtttataacgtctccacaatttgaccatcttagagctcctttcgatagaagcgacggataatatcttcaatatctgtatctaccatcttcaaatcacggacttcaaaatcagataaggtttgcttgataatatcggccgactggtagcgggaactatcgaattcaatattgagagtatttccttgtctatcaatggacatatcaggcaagccctcataatgagagactagatgattttgacctggcgtcaggtcaaaggagagagtcttcatcttgccaaaggtctccttgagctgactcaccgtcccatcaaaaatctcctgccccttgtcaatcataaaaatccgatcacagagttgctcaatgtcgctcaagtcgtgagtggtcaagagaatagttgtctcttcctcctgattaatctgagtaatggcccgacgaatgttatccttgaccgacacatccaaaccaatagtcggctcatctaaaaagagaactttgggattgtgaagcaaggaagccgcaatatccgcccgcatccgttgacctagtgaaagagtccgcacaggatctttgataaattccttcaaatccaaaacttcattcaaaaagtccatgcgcttatggaaaagcgagtctggcacatcgtaaatctccttcaagaccgtgtaggtctcttgcagtgccaaatcccaccatagctgggtgcgttgtccgaaaacgactccaatatccttgacataatcttggcgattgtcctgtggaatcttgccgttaatccgacaaaaacccgatgtcggttttaaaatccctgtcagcattttgatggtggttgacttcccagcaccatttgccccgataaatcctaaaatctgcccttttggaacttcaaaagttaaatccttgaccgcttcaaaggtctgcttttcaggatgaataaaggaacgcaaagcccccttcaagcccggttccttaacagtcttcacaaaatttttctgaagatgttccacttcaatcatcgccatatctatctcctaaagtaaaaaatcaacaaaccgtgtcctctaaacacaaaaagccaatttctcatctcctaaaatctgccttctttatcacagcagaaggtatcagtattactctattataaagcagttaaaaaaggaaaccaagtgttattctcgaaaaagagaaaatagttttgatacttgaaaaaatcaaaaccacccgtctaattcactaaacaaaatgacacaattcaataattcatcaaagcctctacatattcctgtagaggctcatttcaacttctctcattcttgcttgtgaatgtttagatagattataagccacaaaaaagccaccatatggtgacttcattcttatctatttctcctcatcccaaccagtctttttctttggcaatgcggacggcttctgttcggttgcctgcatcaagtttagtcaggatggctgtcatgtaatttcggacagttccatttgaaagaaagaggctttcagcgatttcttggttggttgaacctttggcaaccatggccaagacttcttgttcacgttgactgagtggattattgtcaaaggcgacaccttcgacaagctctggtgagtactccttttgacctgctaggacggtatggatggtcgccatgaggtcactgatggaacgctctttgagaacgtaggcatccacctgggctgcaagggctcgtttaaaatagccttttcgtttgaaggtggtcacaataacgaccttcgtttctctttggttggcacggatccactctaggacatcaaggcctgtcttagctggcatttcaatgtctaaaatggctacgtcgacctcttctttttccaagagagcaatggcttcttgaccatcgctggccgcatggacctcttcgacatcgtcttccaacatgaggagctggcagagggcatccctcaacattgactggtcttcggcaactaataatttcatgcttttcctccctctttcaaatgtacacgaataatggttggatgcgattgagacagaatttccaagtctccatctaccaaactgaggcgctctctgatactgtgtagttcttgtccagtgacttcctcaaagccacaaccatcatcctcaaactcaaggacaataccatgatcacgtcttagacgaatctgacagctatcggcctggctatgtttgatgacattattagccagttcacgaagcaccatggacaaggtagactgactaacgggtgacaggctgtctaaatcaaggctactatccacggtcaggacgatatcagataggtcaaagagccgctcaagttccagtaactcctcggccaccgttcggtacttgagcttattgacaatctcacgcacctcatacatggagtctcggctaatctggttcaattcttccagattctttctagcagcttcatactgctccttgtccatctgtttcaaagccaactcggttttaagactcatcatggcaaaggtatgccctaaggtatcgtgcaagtcacgaccaatacgattacgttcattttcagctgataggatattgatggtacggttggcttcttccatctttctctcctgacgtatacggttttgaaaatagtacattcccaacgaaaagaggagaatagccatagacatgaggtgggtacccaaatcgtctgtcaataggaaggatgataacgtcaaaatcaagagtgtcgctagaaaggataagaagcgataagatgatatgctatcctcaaagcgccaaacgagaagattgacgttgaaaaaaataaaccacatcatccccccctggaaggtcagggtcataaagataatgtaagctagagtgtaaaaccacagaaagggaatccacttactataagcttttttcaaatataccatcaggagataagctatggtaaacagtccagtcaaaactatggtccaaactggaaaatacccaccaaagactcccaatactggaaagacaaggaaaatcagactaacaaaataagcgaaatcatttttctggtaagttctaaacatggtcactttctctgtaagatttaataaaaagggctaagcctgtagctattgtagcatagaccaggataaaaatgagtgatttccatgaaaattcccctttttttgcaaaattgaccaccaattgattgatatgatagatgggtgtccactctgaaatatgctgaacccattttggaaacatggttactggcatccaagaaccaccgataatagcaagtccaagaaagacgatatttccgacgatagacatgatttgttgagacttaatttgagctaggagcaagccaaaggataggaagactaggcttgacaagagtaacagagcacctgaaccaagccaatgtgagaatggcatctcaacatcacgcgcaaaagctcccacacagaaagtcactaggatagctaccataaagttcataagaacacggaagattttagagaggtaataggcctgaatactgatttttgaatgttcgatataggttagccagtgctccgtttggtcctctctaagcatgtagggaaaggtaaaaaagccaaagctggacatggaaaatccagtcatggtcaacatataagacaagataaaggctttttgtgactctgggtcaggactcatttccatacctgaatacaagaggaaaaatccgacgggcattccgatagacatgataaagactggccaactgcgccatgtttttatccattcgattttaagtagtgctttcatgacttgtcctcccttgtgctatcaaataggctatctaaaagtgtcttgttttgaatttcaatgtcagaaatgcgacagccctgagcttgtaaactactccacacactttcaatatctttagtcataaaggttacaacatcacgtttttcagtcacatcataaatgtctgccagtttgtcaagacttggcgcaaagcgacttgataaggtgacttgtttttccttttcttcgctacgcatagcgtgtggcgtagtatccctgatgagtttcccctgatgaaggaccaaaatacggtcagctgtgtgctcgacttcttcgatatagtgggacgaatagaggatggtcacacctgactttttcagatcattgatgatttcccagaaacgttggcgtgtcgtagtgtccatccctgctgtcggttcatctaaaaagagaatgtcaggcttaccaataagacagagaacaaaagcaagaagacgtttttgccctcctgagagtttgtccgcaaactgctgatactggtcatctttaaattgtaagagtgcttgaatttcttctttagataacccattttcagaaatatcttggaaaaaagcaatcagttccctaactcttaattgtgaaggaatagtattttcttgaaggagaaccgcaatttgatcttgcgcttttccctttttacccttgataaagacttgaccgctactggctttcttatcgccaagaatacaggacattaaggtcgttttaccagcaccatttggcccaattaaagcaagacagtcgccttgtcctacctcaaagctaatatggtctaaaatcgtttttcccttaatctttttgacaagatttgtgacttgaaggattgtttcactcatgtttgtgatttcctttcttttggtagaaggctagaaaaacataacaagctgcaacagatacgcccataatactatagagaatatcactgctgccatgaagtaggacataagcaaagaggatggtccaagttgttgctaggagcataatgcttagtattttcaataatttcatactgggcctcctagtttttcaattctttaatgacaaggtcgataaaacttttagccatagtgatgagaatgtaggctgagatagacaagccaataatcatgcccagatttgagaagatagcttcaaaattgcctttttcaaaaaagtcagtaaacatgctaagtccagcaaagacagttccgatgacagcgtagataaggtaagatgttttgattttcatgagatgacctctttcgttttttattatttctaagttatgactaaagtatatctttttggtcattctctttttagcaccagatgtcatgacatgacatgacatttgtcatgtgacgtaaaaaagccgacccaaggtcagcttcaagtggtgaataaacgtttttaaatatgccatgaattaagaaggcctgcatataatgacatcacattctttttgagaacaaagtgagtttaactgagactttccgctatgatacccccctaagaactaaaacttcagaggttcagaaatatcgagaccttatactctaagcttaggtatggaacttccttgacgttcgctgacgtccatcatcacctaaggacagtctcgaaaaagattctttattaaaaaataaaagccaacccaaggtcagcttttcatttatcttaatgactattttttgaatggttcttccaccatgatgagaggatggaacctgagatattgtgccaaatactgaagatagttgatgggatggcagcttgtggcacgaaatatttcatggcaagggttgctccaagacttgagtcttgcatccccacttcgaaagtaatggctttttgttgtggttcttccaaaccaaggatttttgaaaatccaaaaccaagggcataaccacaaaggttatgaagcataacaactgggataacaagggctgtcgctgctgtgaaaatattggcatggttggcagaaacaactgctccaacaatcaagaggatggcagcttgtgaaatcaaaggcataatcttgatgatggcatcgattttcttaccaaagattgagtgaacgagcacacccaagataatagggacaaccacgatacgcaaggtacttaggaagaggctttgggcagggacactcacgtactgaccagccaagaatgacaagagggttggaatcatgagtggtgccaaaagagttgagagggtttcaatagagacatccaaggcaacatccccacctgaaaggaaggccatgacactcgatgaagtcccacttggacaagagccaacaaggataacccctgctgctgtcgcacctttcagatggaaaatcatacaaagcaaccaagccaaaccaggcatgatgacatagtgggctacagtcccgagaacaactggaattggacgcttagcaatacgtttaaaatcttcagttgtcaaggtaagccccataccaaagagaatcaaaccaagcagataagccgtattgggaatgacccaactactagttgcgggaagggcatagttaaaggccgcccagaggataacagctacagtaaaccatttgctgagccatttactaaaagatacaagtgactccataatgaaaccttctttctattttcacagaatagtatagcactttcattttgaattccaaggtaaatttcgaattttctgaaattaatttcaaaaaaaataaaccctcacacttaagatgcgaggattattgattttataaaccttaagacttatcttctaacttctcttcaaactgttgagtccgttcttcgccccaccatagtggcaataattcgcccaaagtaatggtttgacgtgtgtcgtagtcaaccataaactccaagttacgattgtcaggatggagttccattagaaattctcgacaagccccacaaggcatgccagatggtccaccatgaggtggctggtcacgaaaggcgataatacgcttgaccttagtttgaccagtttcttgatacatattgaaaagggcagctctttcggcacatagatggaaaacaccacacgttccttccatacaaaagcccgtgaaaatttgcccatctccagcctcaacggcagccacaacgtgtctagcatagacaaagtctgagacttcctgtggctgatacaaggcttgagccttttcatacattttctgccagatatccattatttctcctttaacctcgatcactttccctttgagacttgataaagagtgcaagccctgttgctactgcagtataagctacaataaacaggagtgatttccatgaaaatttcccattgatagcaaaattaacgaccaattcattgacatgatagacaggtgtccactcagagatgctctgaacccacttagggaacatggaaataggaacccatgaaccactcactataggcaagacaaggtaaataatatttgccacaagagacatgaattgttgagatttaatctgagcgataagtaaaccaaaagctagaaagagcagaccggacaaaagtaagagagcacctgaccctacccatctaaagaatggcatctctacatctcggaaaaaggcacctacacaaaaggtcacaataatggcaaccataaagtttagaagcacacgaaagattttagaaagataataagctgcaatactaacctttgagtgctcgatataggtcaaccagtgttcaattcggtcctcttgcaacatatagggaaaggtaaacaaaccaaaactagacatggagaagccagtcatggtcagcatataagacagcaaaaactctttttgagcttctggagtaggtgctgagaagatactagaaaaaaggaggaaaaatccgacaggtatcccgattcccatgataaagactggccaacttcgccacgttttaatccattcaatttttagtaatgctttcatgccttgtcctcccttgttgaatcaaataggctatccaagagtgttttattttgaatttcaatatcagaaattccacagcccgaattttcaagactttgccataccttttcgatatctttggtcatgaagctgatgacatccctcttttcagtgatttcatagatatctggcagtccatgaacaatgctaacaaagctacttggaagagtgacttgtttctctttctcttcatgtcgcatagcgtatggcgtagtatctctgataagtttcccttgatggaggactaagatacggtcagccgtgtgttccacttcttcaatatagtgagaggaatagagaatggtcacacctgattttttcaaatcattaacaatctcccagaaacgctgacgagtggaggtatccatacccgctgtcggttcgtctaaaaagaggattttaggtttatcaatcaaacaaaggacaaaagccagaagacgtctttgaccacctgagagtttgtccgcaaactgctggtactggtcttccttaaattgcaggagttcctgaacctcttgattggtcaagggattatcagaaatagattggaagaaggcaatcagctcttccactttcaaactatttggaatggtattttcctgaaggagaacggcaattttatttttggccttacctgccttaccatcaatgaagacctgaccactgctcggctttttatctccaagaatacaagacatcaagacagtcttacccgccccattaggtccaatcaaggcgacacaatctccctgatttatctcaaaactaatatcctctaaaattgtctttcccttgatgcgttttccaagggatgtgacttgaataaccgtttcactcatacctgtgatttcctttcttttgtataggaaccatgctaattgacaatagagctgatatcattggagtcccttaatactccacttccaactccgtacagaagagacttccgctcagatgaagtctcgtttcaacttgctctaaatcagattcaaaacgatccacctttacagatgataggggatgtgagattccagtgatgtccatgacacaaccatgaggaagtcgaatatgaacttcaccaaacttagcatcaagatgaactgctacctgacttgatgcaaagctggcttgactcaaatccagccacagctcaccgaaagccatattcatatcaaccgtttcgacttcttgagaatagatgcgatacctatcctcagccatatatgtcttaacagaaatatgtggtccttcttggtcgttcttattgaccttatagtctttagtgagacctttcttttgactacggccatagagcaactctaaagccaaacctattagaaagatgccgctaaagagattccactgtgcaaaatcgaggtctaacaagtcgtgaacatagggcgataagaaggccaaaccaagaaaaatgaggagaggtcgcctattcaagataccaaaacaaaagaaggccacgaagaagaccagattatagttgaccatgatccaaaaatctggaataaaggcactagcgataaaacaagctgctagtaaaagcaacaagaaggaccgaagattaaatcgttccataagaaaactcctttctaaagaaatgattgcaattttccaattattttcactatcagtatagcactatttgtaaacgtattcaatgttatattaaaaggatttgcaagaaaaaagagctttcgctctttcatcattttcaatgtttgacagttacttgtccaaaggatactgagcctgttagagaaactgtagtgcttgataactctcgctctcctagactatcgtagtctttcactcctgctaggcttgtatgaagcccgtgtgtatccacttgccaatccttgggcactcgaatgataacctgagaaaaattggcctgaaccacaatctgaggtcggtcagtcataaactgagcctgacgcaaatccaaggtcaaacgcccaaaatcagcattggcatagacagtttcgaggttttgagaagtcaccacttgcacagactctgaaaaaagagtcttggcaaaaatttctcgctcatgttctttagacaccttgtaagagaattttttcttataacttggcttgctcaaacggtccactgcaatccccaagataagaattcctacaaagagtgtccattccgaatagtccaatctaaagaggtcatggatataggtcgatagaaaagccatccccaagaaaaagagaaatttccccttagattgccagctcaaaagcacaaaaagcaaggctaaaatcaacttataattaaaagccaaatacaaatctggaataaaagctgttgcgataaaataggcagcaatgataagtaaggtaataacacctgcattaaagcgtttcataacaagtcctttctaaatcctgtccttgagtttttctacaaaaaggtaggctgctggacaaaatagcgtatttttgatggtcagatgattaatctgatagattttcttacgatccgtgtgaggaaaagctgcacaagccttggggcggacatcatagatatcacagagattatccggccccaaaaatggacaaggcatagacttgaagactttatcgccatcctcatctacctgcaagtacatctcctcaaaggcaggtaacttcatgcgaaaatgcttggcaatgcgagtgatgtcctgctctgtgaaatctggtcctagcgtcttacagcaatttgcacactgggtacaatcaatttcttgaaagacttcattgtgcacctgttgaacaatcttatctaaatttttaggtgccttcttcttgagctgtgcgagaaacttacgatgctcctcctgcttctgacgtgccaactcctcataacgtttgacatcaatagtctgtgacatgtgttttctccgatgatttataattctttcatctattatagcataaaagaaatagagcctagcatgaactagactctatgttagttacatcgatacgattctacgataagaacgcgacgttagggcgaaaaccaagacatagactaggaagaatacgccacaaacaatgatagtgaccactaacataagacttggattgagaactccaatgatacgcacaatcaaactgatcatatgataggcaaaggccaagtgaataaaggcaaaaatcaaggggaggaagaagacagtaaggacttgctttccaatggtttgcttgacttggaggtcgtccaagccaatcttttgaagaataacaaagcgctcacgatcctcataaccttcggaaatctgtttatagtaaatcacaagaactgtgccaagcatgaagatgatggataggaagataccaataaagaaggttccgccaacaaagccatttaccatcccttctgcatcatatcgactatttgcagtgaagtaagacttagggaggccagtagtttgtccagctaactgttgtgtttctttatccgtgattttgtctagcaaatctgaatttttcttggcatcatgtgaagggtctttgacattaacaccaacataggtagcttgggtggttgctgttcctttgatactttcttgaaaatcatccatatcaggaacaacaaggtaactataatcagaaactatgattgtgaagaggttgggtactttacctttaataaagtcattaatgtcatcctgaatctggtagttttgttcattgaaagacaaactcttttgatcctttaatgttttatttttagtaaataaaccaacttggtttgaagccaaattgaggtctttacctgttaattgtttataagtagcttgtgagaagacaagaaaaattgattttggtaaaacttttctttcattctcagaaaagatggttagcttgttattttcttgttctttgataccaaagtagaggtaagttacttctgtttttctattgacctgatttcccgactgtgataagaaatcatccatcaccttccgtgtacttgttacatctacatttgttccggtaactgagtaatcatgtggagcagcactcgccagatagtctttttttccagcatagatacttgcagcacctacaagcgtcactagaaccatacttgataggatggcaatggtcgccagcccaactgcatttttcttcatccgaaagacaaggttggaaatggaaatcatattattgggcttgtaatagtagctcttcttctttttcaagagttgcagaacaactgttgtcccggcattaaagagaaggtaagtccctagaatgaccagtagaacagctaggaaaaaactcataatagccgttactggattctgaacagagagagcaagatagtaaccataccccatagcaccaagtcccaaaagggtttgaataactagaaaacgtccctttttttcacccttaaggccatctttagttaattgtaaaggattaagccgtagcaatcggaaaccatttaccaaaaccaacaaaccaaaaatacaagcaaagatgacaagaacaataggaattgtcattacttgaaaggtcgagactaaaccagtactttcaccgataagcctttgaagaaaagcataaatgagtttatcaaaaagtgcccccacacctatacctagtagcaaagtcacaaaactcataatcactgtttcttttagaatcatactaaagaggtgacgcttctctaagcctagcacactatagagaccaagctcccttgaacgatttttcataacaaagctattggcataaagaacaataattccagaggatagggcaacaattccaagtcccatccccaaaaccatcttgatagcatctgccccagtcaagtcatccagatgaggattaagcgttaaagatgtaaagatataggtaatggcaatagccagaatagttgctaaagcaaaaggataataaagcttacgattttttatgagattggacaaagccagtctattggttagacgaaacatattagttcacctcacttgccattgcagttagtgtatcggaaatttcctggaacatttgatgttcagacttatcccctttgaagatttgattataaagaataccatccttgataaacaaaacacgctgcgctcgactggcggccgctgtcgagtgagttaccatgagaatggtctgaccgctggcattaatagcatcaaagacatctaatagcgccgctgaagatttggaatccaaggcacctgttggctcatctgctaagagtatttctggttttgtgatgattgcacgcgcaaccgcaaccctttgcttttggccacctgaaatttcataagggtacttctccagtaaggaatgaattcccagttgacgactgattgcctctacttgtgtcatcatttgcttaagtgggcgacgagaaagaaccaaaggtagcaggatattatctttaactgatagggtatctaaaagattgaaatcctggaaaacaaaccctaatctttcacgacggaagctagaagcatccttgtttttgatggttgctgtgtccataccattcagatagacacgccctgctgttggtttatcaagcatggcaagaatgttgagcagggttgattttcctgagccagactcacccatgattgcaacatactcacccttttcaaccgtaaaatggatatctttaagggcttcaacttgatttcctttgaaacgtgttttataaacttttttaacatgttgaacatctagtaatgtcataataagctcctttatttaatagatttggaagagattttaggaacctcttacttaacttctgataccattttatagaaaaagcaaggtctcaaccataacccttgctttcatttctagccttatttcttacacttttgtaagctattaatcaatagccaacttctgcttttgaaaatgaatggaaactgtggttccttgacctacttgggagctaatactaatatcatgtccaagctgatcagcaattttcttagaaagatagagtcccagtccagacgactgctgagtcaagcgaccattgtaacctgaaaagccacgctcaaagacacgtagaatatcactatttttaataccaatcccagaatctttaagataaagtctattatctttaaagtaaatgtcaataccgccagtctttgtgtacttcaaactgtttgacaagacctgctcaatgatgactaagagccatttttcatctgaaataatcttaacatccaggtcatctaggttaatagtcaaccctttttgaataaagaaaatgctatgctttttaacaacttctttaaccaaagggtctaatgcaacctgcctcaactgcaaatcatcatgaaagttttccaaacgtaaatactgcaagaccagattggtgtaggcatcaatcttgaagacctcttgctccaagagagccctcgttttactatctgtaacatcccctaacaataattgactggctgctattggcgtcttgatttgatgcacccaaagagtatagtagtccatcaaatctgtatagcgcttgcgctcctcctcagtctgaaccatttgactctccttagcattttccaaggcctgagctagataaaactctaaaggacttgatggtgtcattttctcatagagataggctaagttataagactgataagagctaaccaagtcccaaataactatgatgatagccacaaatgtcagtatggtcaaggcataatgaagaatatctgctgcctcttcaaataaaaaggcaaacaaaaccaagatgattccattaaaaataaacaaaagatagaaaggtagacgagacctaatctgatatttgataaattgacgcttatccatcatgacgcaacccgtaaccgacacctttcttggtttcaataaaatccttcaaaccaactgcctctaacttcttacgtaaacgtgccacattgacagacagggtattatcatcaataaagaagtcactgttccaaagctccttcataaggtcttcccgactaacgatatttccagcatggtcgaagagaacttgtaaaatctgaaactcgttcttggtcaaagaaacgacttctccctgataaaccaaatccatggccttaaggttcataatcacacccatatattccaaaagactctgatccttaccaaactcataagaacgacgcaaaagcccttgaatttttgctagaagaacattttggtcaaagggtttagtcacaaaatcgtccccacccatattgattgccataacgatatccatggcctgatccctggaagacaagaacataataggcaccttggagaccttacgaatttcctgacaccaatgataaccattaaatagaggtaaaccaatgtccataagaaccaagtggggctctacttttacaaaaaaagataatacttccatgaaatcttcaacaagaacaacttcgtaaccccactgttctagcatttttttgacttgttgacggataacctcgtcgtcctccactaataaaatcttatgcataactcaacctctttcatttcccactattataacaataaataccccaagaaacgaccattctcagcaaatcttacaataatgttagattaaattttccaacttttaaaatagtgcgttttcataggaaaaatcctttgagtcttcaaagaaaatatagtattatgatagagttgatgttggtttatcatcaaccaacgacagcttcatcgaacaatgagaagattacttatttatgtcacgaatcggcgtgacgtttctacaaggtgccgtaacacctaacaataagtaagtcataaagtcataaaaagattttaccgtctttttgtgattttaaaggcttgctttgcaggcctttttctgttattcgattgttttgatttttgccagattctcaatagaatctagtgagaatcaacatacactatagttacattttttataggaggtaatatgaaattactggaagaccgcattctcaaagatgggaatgtccttggggagaacatcctcaaagttgactctttccttactcaccaagtggactttgatctcatgcgtgagattggaaaggtctttgctgaaaagttcaaggatgcaggcatcaccaaggtggtgactatcgaggcatctggtattgctccagccctctatgctgctgaggctttggatgtccctatgatctttgctaagaaggctaaaaatatcaccatgaatgaagggatactcactgctgaggtttactccttcactaagcaggtgactagcactgtctctatcgcaagcaagttcatcactcctgaagataaggttctcatcgttgatgacttcctagctaacggccaagctgccaaaggcttgattcaaatcatcgaagaagctggcgcacacgtcgaagcggtcggtatcgttattgagaaatctttccaagatggtcgtgcccttctggaagaagctggctacccagttgtttcacttgctcgtttggatcgttttgaaaatggtcaggtcgtatttaaggaggcagacatctaatgcaaaataaagaaaaacattcgcaggcggcagtcctaggactgcaacacctacttgccatgtactcgggatcaatcctggttccaatcatgattgctggtgccttgggctattcagctcatgaattaacctacttgatttcaaccgacattttcatgtgtggtgtagcaaccttcctccaacttcaacttaataaatacttcggtatcggtcttccagttgttcttggggttgccttccagtcagtagcaccacttattatgattggtgagaaacacggtagtggtgctatgtttggtgcccttatcgtttcagggatttatgttatcctcgtttctggcgtcttttcaaaagtggccaatctcttcccttctatcgttacgggatctgtcatcactactattggtttgaccctcatccctgtggctatcggaaatatggggaacaacgttgataaaccaactggtcaaagtctcttccttgcagctatcaccgttctcatcatccttttgattaatattttcactaaaggatttatcaaatccatctcaatcttgattggtttgattgtcggtactgctatcgcagcaagcatgggcttggttgacttctcaccagtggctgcggcacctattgtccacgtgccaacaccattctacttcggaatgcctaagtttgagttgtcatcaatcatcatgatgtgtattatcgctacagtgtctatggttgaatcaactggagtttacttggccctctctgatattaccaaagaaccactcgatagcactcgccttcgtaacggttaccgcgctgaaggtttggctgttctccttggtggactcttcaacaccttcccatacactggtttttcacaaaacgttggtcttgtgaaattgtcaggtatcaagactcgcttgccaatctactatgcagctggtttccttgttcttcttggactccttcctaagtttggtgccttagcgcaaatcatcccaagcccagtccttggtggcgctatgcttgttatgttcggttttgtttctatccaagggatgcaaatcttggcacgtgttgatttcgccaacaacgaacacaacttcttgattgctgcggtatcaatcgctgcaggggttggtcttaacggtagcaacctcttcaacagcctaccaaatgctttccaaatgttcttctcaaacggtatcgtcgttgcaagcttgcttgccatcgtcctcaatgccattttgaaccataacaaaaaagaaaaataacacaagaacacctgagtcacttgacttaggtgttttctttgaatttaaaatcttcaagttgtaaagcaaaagaaaagactaagcaactactctgtcttgcttttactgaaagtagctcttgctatttaattcttacgattgacttattttcaattctatagacagcatcgtaatcttccagtttataatgatgggcaatttcaataatactattaggcaactgtttcaagacattacttatttcttttgaacttgctgcatctaaagaagccatcatctcatccgcaagtaaaacctgcttgctcctcaaaatagcacgtgcaatctcaagttttatgatttgaccacctgaaaagttatctccagttaattcatagtctaattggtgacaacaagcctcccatagtccaactttttttagtgttgaaatgagcaatgaatcagaataatcttgataaagagttagattatgtcgcacacttgtatgaaagacatagggattttgatgaataattgcaatattatctaaatttggagtcagctcccttccatcaatgcttttaaaaatgattttcccactatatgccttatcttgccctgatattaacctaaaaagtgttgtttttccgataccactatcaccaactataagattatgctgagacaatgaaaaagtaaccgtaacatctcgaaaaatctcttgattatcataagatttagtgacgttttttaactgaatttcttctaaagtatgtatgtgaagcccttttgaaggaatttctgactcacttccaaatgtcaataatttatcttttatcacttgacttgattgaatacttgcaacagcctccagaatctgttgtaaggggttaataagatatgttgaagcagacatcatagcaataagtgtagtaattgaattttgtttcatgacaagaccaatcacaaatggtccaatcaagccgacagctttcagaggtcctgtccaaaacataactaaattctgaagtgtataatacttaaattgtgtcgtctccatctcactaagggttatgagagtttgctttacattctctttttctgcttggttgcaaataatcgtttcaatccctttaccaaagtctgtaatagctcttaaatttttctcttttgagctacttagtaattctcctgactcttttaactttctcttaaatataaactgaggcaaaatcatcagaaaggcacctacagtaaaaagactacctacaataatattttgtttgagcagataaattacagatactaggacagaggcgccccacactggcgagataagaaaagattggaggaactcctggtctacaattccaagatcttgtgtcaagagtgagcaaagctcagaatccgatatgtttttacaaaagacagcatgattctttaaaatattttctgacagtcttacattaaacgctctaataatagaacgaagcagaatattctctatatacataaaagcgtacacagccacccaaagagagagactcgaaaatgtaaaaactactaaatcccgactattactactatctaaatgacctgccatctggataattacaggaataacaatgccttgacaggaataaagaagcgcaaaaatgatataaagtataatgtcctttttaggaagtagcttaaaaaatttaaccatcattgtgatacagcaactgatttatttttttcaataatcattgcttttacctccttccatttgatactattattttagtttattaatagtatcaactattgaaatttcggaaatccgataaggaaatattatatggaactaggtcaaaaatttaaacagattcggaaacagagaaaattcactatccagagactcgctcaagtagctggatctgtagcgagcctttcagactttgaaaataacaaaacatcactctcaaatgatactcttttcaaacttttaaaacacctaaaagtcgaatataatgaatttttcggacaagaatatcttgtggacgaaacctacataaaacttgctaatcaatacaatcaagcctcaaatcatctagactttgaagcactggagcaagtcgcagaaaagtttcgcattttaggagaaaccaattatagtgattatctgattagtctttgtattacctgtcaggtttcaaaacttcaaaaccagtcagttaaccaagatattgctacagaacttcaaaactacttcttttcgattgatatttggacacttctcgatattgatttactggatatggtaaaggatatcttcacagaagatgcgctaaaaatctacatcaaggaactcctatcaatactcaataaaaatcctagaaataatttagatcgagtcactttagatgttatcagtcgttgtattttccaaatcattctttacggaaatcaagaagatagtgactactatataaacgaactaaaaactattcaattaccagactatttcatgttacaaaaactctaccttaaagaactagaagctacatacctttataaatttatcgataagaacatgggaaattcattacataaagaagttctccactgcttggcttttatgggagatgacgaaaatttgagagaatgggcccaaactttccgtcaattatagactttattggataacagttgtacaatgattatataatttgaaaaatttagaaaggaaaacagaatgcacgaaacacattctctccgtgagcgattccttgttttcttcaagatttttgtgcccatactgatttatcaatttgccaacttttcggcagcctttgtggacactaccatgactggtcaatacgataccctacacttggcgggggtagccatggcaacgagtttatggagtccttttttcaccttcttaacaggtatcgtctctgccttggttcctattatcggacaccatctaggggcaggtcgcaaggaccgagtggcacctgatttctatcaatttctttatatggccttgggcctatcacttatcctctttgccctcgtttttctgggggcgcccttggttttgaatcatctaggtctggagcctttggtcagaaaagtcgcccttggttatctacgatttttgagtcttgggattattccccttctactctttagcgtggttcgttccttccttgatgcacttggcctcacgcgcctttccatgtacctcatgcttctgctcctacctctcaatggtttcttcaatttcctcctcatctatggcattgctggtttaccagagttaggaggagctggagctggacttggaacttcattggcttactgggcccttcttcttatttccatctcggttatcagaaagcataaaaagattaagccctaccacattgaaaggattcaaccccttgataaagcagctctggttgacgcccttaaactaggtctccctattggtggaacggtctttgcggaagtcgccatcttctctggtgttggtttggttatgtctaagtatccgtcactagtgattgctagtcaccaagcggccatgaatttctcaaatctcatgtatgcctttcctctcagcatttccagtgccatggctatcattatctcttacgaatttggggctagacgcatggatgccgtcaagagctacagcaagctgggacggttgacagccctaggtttttctatctttaccttgattttcctctacttcttgcgctatgatttagcagaactttatgggcatgagcctgactttttgagaatgacggccattttcatgacctatagcctcttcttccaagtggcagatgtctttgcggctccacttcaaggaattctgcgtggctataaagataccaaggtacctttttatctcggtgtcctaacctactggggaatcaccctcccagttggcttcctgcttgaaaaagtcactggacttggtccctatagttactggattggcctgattgccagtcttatcgtcagtggtctctgttaccagtggcgcttaaatagaatcgtcaaacgatacgaatcacaacagtaaaacacctgaagcagtcttttccgactgctttttctatgtcaaaatctcgataatatagaaaaaaaactcctgcatattgaaaacagataaactgttatcaatacacagaaagcttcttttgatgagtgattaattaaattcagattttcctgacctattaccaaactggattcattaatgaaaacatagatgtttaatattgaaaaaagtatcacagagaccagctggatcaactagggcaacataaatcatggctaaaccacatagagctaggaaatgataaacataaactactttctcccctgttttaggaagtaaaagaaaagaccagaaccacaagacacaaatggctattaatatgattagtttattcatccattccataataatctccgtcaaaaaggtttagcacaataaaatagtccttaggactatctgaatgttatcacaaaatctaacaagcgctgtcattacttcttaaggaaatatcttagtattctcttgctagtcttgttttggtaagttaagacatataaaatcatattgggaggttgggaagactcattattacacaaagtacaataatgtttacagacgccaaaaccagcaaaagccaaggagaaggacacatttacacttgtcagatttctcactattatagtgtactattttttctatatacgaagtaaaacaaattggataaaattgtaaaaaaatgtaatgaaaggtcacttttttgtcctgaacggttaggtaacatgttatgttagctttaaagggctttcaataaattcttttacaggtaaaagaggctggtagcaagcagtaccaacctcttattttatgataagcttctgctagaaaaactcttaatactagtgaataatcagtctacttggtcaagtaagtaggcgtaaccttctttttccatatcggctttaggcacaaatcgtgtcgctacaccattgatacaatagcgtaaaccacccttgtcacttggaccatctggaaagacatggccaagatgagaatcccccacacgactacggacctcaatgcgttccatattgtgagaatggtcttctttgtaattggctacctcaggactaatggggcgagagaaactcggccagccacaggctgaatcaaacttatccttggatgaaaagagtggctcgccagtcaccacgtcaacgtaaattccaggctcaaattgattccaaagaggacttgtaaaggcccgttccgttccattctcctgagttacagtataggcttctggactcaagctttccttaagctcctcctgatttggcttgtgataagcactggcatcaatgaccggactagctgcctgatggacattgatatgacagtagccattaggattcttcttgagataatcttgatggtaatcctctgcaggaataaagtgcttcagaggcaacaattcaactgccaaaggctgaccgtattgctcagtcatttcttggaaaacttgctcgataattggcaagtcattttcatcggtatagtaaacacccgtacggtactgactacccacatcattgccctgtttatttttgcttagagggttgatgatacggaagtaatgtagcaaaatctctcgcaatgacacttggctggcatcataagtcacctgaacagtctcagcatgacccgtctgaccaataagttcatagcgagtcgtctcactacgcccattagcataacctgaaaccgcatcaagcacacctgacacacgagagaaatactcctcaacaccccagaaacagccaccagcaagataaatagtatgattattaggatttgacatttttaacactcccttcaatagatactttcatctccacgccttaagtgtaacgcttttaagaagatttcgcacttaaggtgacttggaaagacacacaaaaaatcccatcacaatgtgataggattttatttttattccatttcgaagctttcgctcttaatcttatctggtaagacgagagacaagaggatacacaagatggctggtatcaaccatggcaaggatgctcctgacaatggtaggaagttaataagggcatttagtcctgcaagctcgaactggctaccaagaacgctgagcaaggcaatcagagtgactacagcaactgtgacctgcatacctggtttagacaaggccacgaacttgttggcaattacaatcatgacaatcgtgatcgtgattgggtagagaatcaaaagcactggcactgagaaagcaatgatattgttaagtcccaagttggcaatcgcaaacccaatcaaggtaaagagaatagcgtaagccttgtaggatactttcggaaatgccttgtggaagaattccccagtcgcaacgataagtcctgcggttgttgtgaaacaagtcactgtcaccatgatagctaggaaaatttgagccgctggtccaaagatagcttgtgtggcttgtgacaagacgctagcaccaatattggcatcttttggtaggcctgccacttggagtgggaaatgattgcccaaaaaggcgagtcccaaatataaagcaccaaagagaagcgtcactacaaaaccaacaacccaaatagtcgaaatatactcttttttagacttaaagcctaattggttgagtgttactactgctactacactgaaggccacagaagccaaggcatccaaggtgttgtagccttccaaaaatcctttaccaaaagcagaagcctgataggcttgacttgcatcctgaggactgtgagcaccgtatttaagtgctcctgccacaataaccataacaatcataatagcaaagacaggtgttaagatacgtccaatactatctagaattttagatgggttcatggcaatccaaagtgctaaagcaaagtagattacggtaaagacaaagagccaaaggctggtatgtccactgccaatcaaaggcgagaagccaatcgaaaaggctgctgctgccgttctaggaatggcaaagaaaggaccaatagacagataaaggactgccaaatagactagggcaaacttaggcgagattttttgtgaaatctcatgaatgtaccccttaggatttagggtcccaatcaccagcgttaggatggcaataccaatacctgataggacaaaccctgcaatcgcaggccaaaaatgacctccagattcaaagcctagctgaggcggaaaggtcagatttcccgctccaaagaacataccaaacaacaataaagctgtaaggcctcccttttttaacataagtttctccgatctaagacaaacaagatatcatctcaaaaaagataacttgtttattactattttagtcaacttacttagtatgacatgattagtttggaacttcaagctattgaaacttatttacaaaggtttttaaaattgcaaattttctgtatccttgtacgaaaaaactagacaagattctcatctcgtctagtttgatattttgattatgggtgactgacaatcaattcaagctctcccttgatttcccaagcttgaacgtcgctaggtagaatgaagtgaacgcctttagcaattgggtattcttgaccatcaacaaggagacttccttgaccgtcaagtacactaaacaaactgtaatcagcaatcttttcaaaatcagccttacctgaaatctcccatttataaacggcgaagaaatcacttgctactaagagcgtagatttgaggtcatctacttttgttgtgactgggcgactgttggcaggttcaccaatattaaggacatcgatagatttttccagatggagttcacgcaggttgccctggtcatccttacggtcaaagtcatacacacggtaggttgtgtcacttgactgttgggtttcaagaactaagattcctgcaccaatggcatgcatagtaccacttgggacatagaagaaatcgcctgctttaactggaaccttggtcaaaagatttttccaatccttactttcaatttgttggcgcaattcttcttttgatttggcattgtgtccataaatgatttcagcgcctggttcagcatcaatgatataccaacactctgttttaccaagctctccttcatgctcgagtccgtaagcatcatctggatgaacctgtacactaagccaatcattggcatccaaaatcttcgtcaagagaggaaagacaggttcctgacgattgccgaacaactcacgatgctctgcatagagaatatccaaagttttacaagcgaaacgaccattcttaatagtagaaacaccatttgggtgagctgagatagcccagtactctccaacatggtcgctaggaatgtcgtagccaaagacatcacgcaaatgcgtgccaccccaaattttctcctgcataacagattgtaaaaataatggttcagacataaaaactccttatataagaatgaatagactcaaaatctatgtcttaacatagatgattactcacatcatgataaatgaatcagttccactttaaagcggatgttccaaaaatcacctatagccagtaagctccatcatcagcaaatcacaaacagactttgacgagtaattacctcaattataagcataatttgtgaaaatatcaacagagtccttaaagaaatcataagattttggcttaatggctgcaagtcatttcaatagcaaatttcctttaagaatcctactcattccttcatttttcggatagattgattgaatttaaagactttttaacctataatgttattgatattatgaaaggaaatctctcaatgaaattctattcctatgactatgtgctaagtcagattagccagcaaaactgggttatggttgccattgctgcaggacttattttagtgaccggtgtatttgcttttaaagccttcaaagaacgccatgatactaagtttcgtgaactctctattatttctattttaaccttagttgccgtggttctaattgctatcagtaatttccaaagcaatcaatttaacaacgaccaatttagagcatctcttcactttatcgaggttgtgtctaaaaatcttgacgttgataagagcaaggtttatgtcaatacttctactactacagatggcgctatcctcaaagttggaaacaagtactatcgtgccatctcaggttcagaacctgacagctacttgttagaacaaataaaactttacaagtctgatgttgaactcgtggaggttaaaaaatgacatctttttatcttactgttgcaattaaactagctttggggcttatttcactcgtctttgttatcaatttaacaggtaaaggaaacctagcacctagctcagctactgaccaagtacagaactatgttcttggtgcaatcctcggtggtacaatttatagtagtaccgtttcaatcctccaatatatcgtgattttgattatttggacgattttgattttacttctaaaatggctaattaccaatattctctttatcaaacatttgattgacggtaaaccaactgtcatcatcaaacatggtcaactagatcctgaagcttgtcgctctaaaggactttcagcctctgatgtcgctttaaaattacgttcccaaggaatttttcaacttaaagaggttaaacgtgcagttattgaacagaacggccaattgattgtggttcgtgcgggtgatgaaaatccgaaatacccaatcgttactgatggggtcattcaaacagaaattcttgatactattggtaaaacggaggattggttaaatgaagagcttcaaaaaatgggatatgacaacatttcagatatcttcatcgctgaatatgataaaggaaagattaatgttgtcacttattaaacaaaatacttgcattaccgtttaatattgtctacaatggtctcatcataaaaaggaggttctatcatgggaatcgaagataaattgaatcaagctaaaggtgctcttaaagagggtgctggtaaactgactggcgacaaaaagactgaaattgaaggtgctgttgaaaaagttgtagcaaaagcaaaagacggtctcgaagatgttaaagaaggcattgaaggtgctgttgaaggccttaaaaatagctttaaaaaataagtaaaaaaactgtatctgttcatcaggtacagttttttttatgctttaaatgagagattacttacgagaatgcttgcttcctttaagtgcaaatgatgttgtcatgagtacagctcctaatgcgcctagtcccaagctactcacatcaccagtatttggtaggcttgatttacttgtttggttcgtttgtgagcttttgtcagactggttagccttagagcttgtttgggtgttttgtttttgtgcaagattcgtctgtacgactgggcttacattttccttttgacttgaaatttctcttgcctgaccttttggtacttcagagctttgattttgagtaagactcttactcaatttttcagcagtctcttgaccttcttgttgggtaacacctgtcgcattggtcatgctttgtgtcggttgttcttctgcagactggttaggaactgttgtttgtgattcaaaagacgacactttagggcttgaagtttttgaagttgacgtgttttgacttgataaagccgtgtttgtcgctgtcagtgctgaagcattgggagctggttgactagcactgttgcctgtcgtagtgctagtattcgtagagcttgagctacttgtttgactagcaaagtttggtggggtaggacgtcctgtattagtcgtttgacttgttgaacttgtagtacttgtgttagacgtgttctcggaactggtcgaacctggttggccccatggtgtgttaatgctaccagtattggtagagcttccgccatagctagtcggtcccccatagcctccgaaattatcagacattgaggtattaccaaagcctccacctgggaagccacccattccacctgcaccaggaccgttatttgtgccttcttcagtagctgttgcagtggcacttgaaccacttgaggtcgtgatggtataggtttcacccgaagttagactctcggtactaaagaccacattgccaaatgaagacgtcgctgtcgttgtggcaacaacatttccggaactatcagtgactgtgatggtgtcccctgcactacctgaaatgttagccatgatgtaagattggcttgaacctgttgtaaaggcctgagccattccttgattaccaatggcccaaacggtaccgcccgagatgatacctgtcccatcatagtcgatagccgcattatctgcacttgtctgagcgacatagagagaaccacttttaacagtcacattaccgttactgtcgataccgtcaccgtctgctaagattgtaaccgttgcaccgtcaatattgatggcaacttcattttccaaatcagaagtcgagttggttagacttgaagtgtctgcactgtccttggtcgtccactcagtggcgttaataccgtcatctccagcagtgatgtcaacagttccacctgtcaagttaatataacgtccttcaaggccttcgtctcccgccacgaccgttactttagaattgccttcaacggtcaattcatccgtaaccgtgatacctttatcagtcgcattaatggttaccgttgagtcagtaatcgtcaaatcaccactattcacatctgtttcgtcttcgacttgaataccatcatcagttgccgtgatgttgactgtggcatttttaatggttacagctgtcgtcgcattgatgccatccttggcctcagaagtcaaatcaagcgttacagagtccaccgttacactatcagccttaatggcgtgcttttcaatacttgaaagggtcaagctacttccagtaccactggtaatggtcaatgctcccgctgcttcgatggcattggcagaggttgaagaaatggaactgtctgaaaggacattaaccgtcaattctgctgaggaattagaagtgattgacgaatctgttaaggtcactccatccaagtagattgtaactggatccgtcacgctaccagccacaataatagtgtaacttgagccattacctgttagtgtatatgaacctgattgattaatggtaacggtagtgccgtcaactgttactgtgctactatcactcgttaccacagttgtcccattaaaggtaatcgtggtcgtcgtgctttctgaatcatcactgctagactcagttgttgtctcagacgtagtatctgaagcgttgttggttagaactgaagctgtctctgaagcagtcgcttcagtggagcttgtgcttgtatgagtgctactgctttcatctgtagtagttgttgccgtttctgaagtctcattagttgttgttgcagcagtttcagaagaacttgcttctgaagttgaggatgtgcttgactgatcagatgtttcactacttgacgatgtatctgttgtgtctgctgctgtacttgttgctgatgaagccgtgtcggaagtcgtagttgtagtacttgtatcagtgtctgtacttgtttcagtactatttgacgaatcttctgtctgcacactttcctcaatcagatctgcagtagtttcacccgtcgtaaccgttgagagtgttgattcggtgttagtctcatcggctgaagccttattttcatttaagacgaccgagctaccaaaaattaagctagctactaggactgaacctgcagttttccattttgatgattttttaatggcgtaacgttcttgtgcttgtttcgtatctttgtatgtcatatgttggacctctttcttacttttgagatgcctctattaaacacaagaaacctaagacaagacttaaagaaaggttaatctttccttaaagtaaaaaaaatccccaaaactatgggaactttcaatttctaggatagaccactctaaattcttctaaaacaactagactttcctgactaaaatgtaatccaacctcttccaaccaattgctaaagagatcctcatgaagctcttgccagtaagctagggttcgatctccttcaccttcattatatcaaaaaatgataggccagatggcactatcattttcatcttaatacttagaatgtttgtaaccgtaaaaggcatagatcactgaaccgattagcactgccaaaccaaaggctaaccatgtctgccaactgtactgactcataaaggagagacagacgataattgaaataataggcaagaccggaacaaacggaaccttgaactcgtccttctgtggcaagcccttctccttacgaagaataatgagggcaatagccaagagaactaagtaagccaaggtcgcaatgttaaccaatgatgccatgttggccaaggagaatatacctgctgagatagctgacaatacgcctgtcaaaagtgtcgcatgatgtggaactttattagtctttgaaaccttttgaaaggtttgaggaaggaaaccatcacgcgccaggctataaaccatacggctaagggcataggccattgaaatacataccgtaatcaaggtcataatagcaactacagaaacgtagttggctgcccaagaaataccgatatagcgaagggcataagccacagcatcatcaacattcaacttggtatagtgaaccactcctgtcaaaacgagcgaaaccactgcatagagtgaagccacgataatcaaggcaagaacgatacctcgaggaacgttcttttgtggttctttaatctcgtctactgtcatagagatagactcgaaaccaaggaatccaaagaacatgagggaggcacctgccataattcctgtctttcctccataaatttgcccaaagccaaatggtgcaaaatttgcccagttgctaggattcaaatggaagaggcccactaagatgaagaccgccaaggctgaaaacttgagcactaccaatagggagttcaaacgaagggcctgcttggaattcatgagaagaagagccgtcaccaagaccaagaccaagactggcaagaggtcaatgtaagtgccttgactgggattgaaaggtccactgatggcttgaggcaacttaagaccaaagctagccagtagacccttgaggtaggcaccccaaccagaggcaacactggatacggcattcataaagacaatcatggtcaaccagccacccatccaggcaggatactccccccagacagcatagaggtaaccatagacaccaccggctgacgggtaacgtgaggcaaactcggcaaagaaaatcgctgacatcccaacacacacggctgaaatcaagactgaaataatcagggcaggaccagctagagtcgatgccgcagtaccagtaatcgtaaagattcctgtaccaaccatggcaccgattcccagaaggaccacatccctaagggtcagatgtcgtttcatctcagtctgagcgagaccaacatcctttttacgaaaaatactcatttttatactccattttttgctaaataccgaactattataccatatttcttggtctaaatggtcttttttctgtatttttatacttttattggtgaatgctatgccaaaaatagggactcctaatgcttactttttaattttccatacatctcgattaaaaggagcttgctaaaatggccctatatcattctatttcgtttctcaaatccttacctaaaaagaattttcaatttttagaaaaaaacatgaaaatcttatgaatgcgtttgattcttctaatgaaagatgttagaatggggtcattaaaaaggaaaaggggagcttttatggaaaataaagttcattttaaacttcataaagtgaaaaaacaatgggttaccattgccgtgtctggtttggcacttggtgcctcattggttggagttggtgtctctgccgacgagcaagctacaaatcaagttacctcagctagcacacctgaaagcgtcaatcaggatcctgagcttgtcgtcacagaaacaactgtagctacgacaaaagctgatcaaggcgcaaccaataaggcaagtgatacaactgctactgtcacaactgataagcagccagtccttaaagaagaccaagcaagcagtacttacaatttgtctagtggcgaaacgagaactgctacttcaacttcagaaacagctaacacagctactgacgtgaatagccaagcaccggaatctgttgaaactgctgtcgtttctggcggtcaattcaagagcgatgttgagggcaactggtactaccttaaagacgggaaaaatctgacaggtccccaaaacattgaccatttcgacctttatttccacgaggatggcaagcaagccaagggtgagattatcacagaaaatggagaatctttctactatgacaaagctaatggccgtaaggtaaccaatacctctatcaacatcgatggtcaagcctacaatgctgatgcccaaggtcgtttgacagcagttctacctgaaacaaacaaacgcaaccagtttattgaagacaacaaccacaactggtattacctcggcaaagatggcaaacccgtcactggtgctcagaacatcgatggctttaacctctacttccacgaagatggtcgacaagctaaaaacgaaatcgtcactattaatggtgatagctactatttcgataaagacaatggacgtcgtgtaacaggtcgccagtatcttgattatgcaaaccataaatactttggttattactactttgacaaagatggcaagatggtaaaagatgacttcatcactgagaatggcaatctttactactttgatgctactggtaatcaacctgattctgtctttgtctcagataagtcgggcaactggtactacttcgataattacaaggcaactaaaggcttctcagccccatttggtttccgcaccgaattcctagaccgtagccaagctgactacaagacaagcgttcaaaacctgaacggacaacagtattactttgatcctaagactggtattatggtaaccaatcgctatgtttctgacgacaagggtaattggtattactttggtaaagacggtaaagcgcttcatggctttcaaacggtagatggtagccttcactacttcaatgatagtggtcaacaagtcaaaggagacttcctttactacgataacgatatctactatttcgacaaagacaatgggaatccagtaaccaaccaattcattaatagagataactcttggtactacttcggagctgatggtaaagccgtgtctggtttccaaaccattaacggacagaacctttatttccacgaatatggtgtccaagccaagggacaactggttactattgacggcaaaacctactacttcgatccaaatacaggtgacaagtgggtaaatcgctcacttaccttaaacggtacggtctataactttgatagcaatggtgtggcgactactaaagctgaccaaaccacaaatcgaaatcaatttgttaaaggtactgatcaagaatggtactactacgatgctaatggcaaaaaggtcactggtttccaaactattaacaaggacctctactacttcaacgataagggacaacaagtccgaggaaagattttcaatctaggtgataactactactttgccaacaaagacactggtgctgtccttcgtaatgccttctacaatgataaatctactggtcgttacggtgctttctctgaaaacatctactacgctggcaatgacggtgccttcaagacaggttggtttgaagttgatggcaaccgttattatggtagcgactattctgatgacgacacgcctaaaggaaatctctacacaggagttatcaactcacaactctttagcccagatgggaaactcttgacaaacggtctctatcctgagttcaagcgtactggtgaaaattcttatgaacttgaaggtgtctatgtcacagatgccgacggtaatatcaaagaaggtccttatcaatatgatggtaagattcttggttctaaatatagttacgtccgccaatcacaatggtcaacttttgacgaatgggatattcttaatggacacctctaccattttgactcaacacctatgaccttcacagcaccaaatggccaaaaagtgaccacaaacgttgccattgcaacaactaacaaggcccttacttatcacggcgtaatctttaattttgatgccaagggtattgatgcggcaaaagaaaaagctatccactttgaccaattgcagacggatcgtaacggcacaagttatctctatgaaaatggtcaaaaagtcactggcttgaagacctttgatggcgtcacttactatttctacgaagatggccgtcaagccaaaggcacagaggtcacaatcaatggtaaaacttaccaatttgaccaattgactggtatcatgactcgtaacgccttttcaaaatcatacaactatgaaggttctccacgcttcccatactacccaacacgctactatggtaacgacggagctgctcttactggttggcaaaccatcgatggcaaagactactacttccgagctagtggaaacctcgaaacaggacgttttgtcatcggagacagagcctataatgctgatgacaatggtgtagttgctgaccgcaagggtgagcctgcttatcgcaatcgcattgtctacgataaaggtgacaactactattacaatgacaaaggtgaaaaagtgaccggcttccaagaagttgatggcaaggtcctctacttcgacgctgaaggcaaacaagtcctaggacgcttcgtcacagtcgataactatacctactatttcgaccctaaaacaggtgaaaaatacacaaaccgctctgtcctcatcgatggtaaactctataccttcgacaaagacggacatgtcgtgaagtaagtttagatgaaaccgagacgaaagtcttggttttttttgtgggttcttttaaaattaaatttttcgaactttcttccataaaaactgaaaaattgtaatttatacttgagtttttcaagaattaattgataaaatttgcaatacttttactatttttttcacaatataacagcttccgaataattaaaaaattattatagaaatatttgaatatataaaaatcaaatgttaaaattaaggtgaaaagtgagaaacggaggatagaattatggaacacaaaactcatttcaagcttcacaaagtgaagaaacattggattaccattgctatttcaagcttaacacttggaatcatcgcttctaccggaaatatcgcttatgctgagcaaccggaattacctcttactaatcaaacaatagaaaattccatagtttttgaagaatcagctatcaacacatcgaatactttcattgatgaaaagactactagccagtccgaatcgtctcttgaaacatcaacaaatcattctacgacaaccgatacttatacagtcgacaacaacttgaaagtatcgcttcctgaagatagtaccgtaccatcttcaagtgaagcatctttggaaggagctactaatgtttctgaagcttcaagtattgaaacacaagaagataactcaattacaggaggcaacttcataactgatgaatatggtaattggtactatattaaagataatcaaaagttaactggctttcaaacagtggatggtgttcctctttactttgaccaggatggtatccaagcaaagggtaactttgtaactgtggataatgaaacatactactttgacaaagattctggtagaaagttaacgaaccaatttgttactgatggtggctatggatggtactatctcggagctgatggtaaggctgtaaaaggagcgcaaactattgataactttgatctctattttgatgatagaggatatcaaattaaaggttcgctagttaatatcggagaacagacttactattttgatccatacaacggaagaaaggttaaggacaaaaagatttatgtccatggaggtacattctattttgatgaatctggcgctgcagtaaaaaatcgttttatttctgataatgaaggtttttggtattactttgataaagatggacatatggttaccttcagtcaaatcatcgatggctactctctttattttcattctgatggaaaacaagctaaaggtcaactaatatcaatttgggggaaccatacaggaacacattatttcgataaggataatggtagagaggttaagaatgccatcttcgagcttgatggtaagtcttatgaagctgatgaaaacggtattgttaaagaactccctccatatcgtaaccaatacatttctgaaaatggaaatgattggtcctattacgatggttttggacacaaacttattggacttcataatatagatggtgtaaatgtttattttgatgataacggaatccaagcgaaaggaaaaataacaactataggtacagacacttatttcttcgaaaaggataatggagcaatgcgtacaaatcagctttctgtcattcctaccagagtgaagaaaaccgtaaatgtttatggtactgatattgacatagatgagaacgtcaatatcacttactattttggcccggatggaaaggctataaaaggattccacacgatagatggacaaacctactacttcaacgagaagggttgggcactcgatggcattatccatgaaaaagatggcgactacttcctccaaaactatcatttaatttacaatcagtttgtaaacacatactctgataatcaagatgataaaacaattactggtacctactatgtaaacggtgaaggaaaggttcaagtaggatggcttaacaaagacaataatcgttattatctagatcctgaagcaggtggaaaagtcacttacggttggaaagaaattgataataaattctatcatttcactgagaaagataatcaagattctgctggtcaacttattcgcaatcaaatttatcaagatggcgacatcttagtaactattgaccaagaaggaatcgtaactcgtagcactgagaagcgtcaaacatttgttaaagatgctctaggaaatagttattatgtcactaatgatgggacatttttaacaggtcctcaagtggttgatggtatctctctttattttgataaagatggcaaacaagtaaaaggtcaattacgtaagattgatggacacatccattattacgataaactcacaggagaaatgatgacaaatcgtttcgtcacattattactcggagaatatgttccagaagaagattatgaaaaagttatccattttggaatgcccgcagctcctggaagcggtagtggcgacggaggggcttctagagtcgctagatactactttgataaagatggcaaagcaataactgggcgtcaaactattaatggtaaagattacaatttccaacaagatgggcgtgccatcctgaataaaatggttgattttggcggtcaaagctacttctatggcgatgatggagctatggttaaaaatcaaactgttatgtttaaatttttagctataatgagacaatttacggttagctatcactttgatgaaaatggtgttggccactacgtccactagcattagttgtatttctttacctcaataacgtctaatttaggaatactacatctaagagagtcaaaaccacctgtgagaatgatagtgtctgttttttaaagtcagtcgtacaaaataaatgtacggctgttttttatgcataccgcttagacttgtacttctctattttcttcttagcgattgggtataacaaaggatatctgaaattaaggtagcgtttctcacttccaaagccagtttcatgatcaatattcaacatggtatagtggataaggttcgtcaagaccagagtaactagagaatagagaactgctacaattatcagggatatgacaataaatgttcatatattattgattaaagtttttgaaatataagttttttattaaacataaatcacttttatgaatcctctagaaaatcataaaaagccctaatttttgaatgaaattttacattaacactcgtaatgtactattgttatcatgttttaaatcattttaagtatcaaacaaaatctttcaatttacatatttttaattttttgacttttacaataacctctgttataatcatgatatatcaaggaggaattaatgaacatgaataagaaattacatgctactattggtcttagtgctgcaatcttagcacttggtctatcatcttctgcacttgcagatgaacaagaattgccagtaagtcttcccgctacagaggctcttgataacacttcttttgaaaacctagttgttgaaaacatccctgcttcagccgttgatgttaatctaactagcgaatcagtaagcacaactactactgctaatcctgccactgaggttaactcagcgagcactgctatccttagcgaggaagtaactacacctgcaagtactcctacaccagcagttgaaaatacaactcctgtaagtcttgaagaatcaagtccagttgtaaacacaccaacggttgatgaacgtgtgtcagaagttcgtattcatcacatccgtcgaacaaccgaagcaagttactcacaattcagttctcaaaaagatgtgctttatgcaacgattaaagctcctgctttcactgaatacgacactgctgcttttgcgccagcaacagtaacagatgaaaacggaaaaacatggtatttcgctaaatacgacgacatagtgcttaacaataagagtaattacggcgcacctaaaaaagggattgcttcaagtcctattattgatgtcacctacttctatgatgatgttgatcttgcgccaactgtcgcgcaacaggcccgttttgtcgatgataagggacaagaaattgctccaatcaaagtcaacatggttagacgcgatattgatttagcttactatgcctatttcccgactgctcctgaaacgattcaagctaatggtaaaacatataaactacaatcaactgatgatcaagaaattaagtcacacaaaattcgtatttcaaatactgtgacaatcacttatatttacaaggaagttactgaaggaacagctgaaaaacctgtaacacctgttacaccaacaagtgctaaaaaacttcgtcttcctaaaggcaataacggtgtgaaaacgcgtatccctgttaactacaaacaccaaacaaattcttcaaaccaaggaactacaaaattacgtctccctaaagggaataatggtgtgaaaacacgtgtaccggctaaaaagaacactcctattcttgcagtagactacttataagcaaaaaaaacaaagacaaactaaactcgtctttgtttttttcattcttaattaaaacagcagattttttaaatcatatattccaaatcataactagcatcagaaagaatacgtgccaaaaattgttgtgtacgtttttcttttggtctgtaaaaaatgtcttttggactcccctcttcgatgacatgaccaccatccatgaaaacgacatgattagctacatctcgtgcaaaccccatttcatgagtcacaactaccattgtcgttccttcatgagcaagttgtttcatgacatccagaacatccccaactagttctggatcaagggctgatgttggttcatctaacaagataacttctggtttaactgctatagccctggctaaaccaatacgttgttgctgtcctcctgaaagttgtgatgggtagtaatctttaaaatccagaagaccaacttttttaagtgcttcttcagcaatctcttgcgcttcacttttaggaactttcctagcaatcactaaaccttccaagatattctcaatggcagtcttgtttgcaaataaattgtaatgttgaaatacaaaagctgtcttctttcggatatctaaaatatctttctttgataacttatccaaagagtagtccttacccgaaattgttaattgacctccatcagctttctccaaatgattaaggcaacgtaagaaagttgtttttcctgaacctgatggtcccaagatgacaaccacatctccctgtttcacttgtagattgacatcaacaagaacctgacgatctccaaatgtttttgatatatgtttagcttctagcatagtgactccctctatgtaaattgcaattttctttctccaaggttaaagagaacttgaatgataccacaaatgattaaatataaaatgaagatgacaaaataagattcaaaatattgatatccatatgctgcttcgactcgtgcaattgcggtaatatcttttatcgtcataacaaagacaagtgacgttccttttacaatattgataactaagttacacaaatttggaagagcagccttaagtgcctgtggaaaaacgattctcagataggcttgtcttgttgttaagcctatagcttgtgcagcttctagttgacctttatcaacagttagtaatgctgatcgaatgatttccgataagcttcctgtcgtcatcaagctatagataataaaggcatagtaaagcgggttaactttgaagacatctatgtgactcccaattcctttaaaaaactgatttaacaaactagggaacaaactataaaagaataaaattaaaagaattggaggtgttgcacgaataaacgcaagataaacaattgaaaaagtcttaacaccccgtaccttataaatttgacccaaagcgagaaataaagcaggtagaaaactcaatagaatagccacaatcatgattcccagtgttaccggaacaccatagaaagccttgataaaggtatctataataaaagtaatattcattttttacctctcttttacactcaattgttgctctgctatcctagaaatcaacgatagaattaatgctattccccaataaacaaaggcaacagctgtataagtctccaaagaataatttcctaaatggcgactaatcaaaaggttccctttgcccataacatcaataaaaccaatcgtataagccaaagctgcatcacgcataaggttaagtatagctgttgtaatatttggtaaagcaaccttaaatgcttgaggggcgataattcttacaaaggtttgttcagaagtaagcccaatactaagcccagcttctaattgtcctttagggattgcttgataagctgctttaagtacttctgatatcattgctgagaataggagaaccatagtcacaagaacgaatatcaatttggaccaatcattaatatctaatcctaaccaccaattaagaaattctggaactccgtaaaatactaaaaatagcaacacaatcggtggggtacagcgtaagataaaaacatatcccttagccaaattctctaaagctttatccttagaaaggcttgcccaagcaactaatcctcctaataacgacccaagtaaagtcgttaataagataaccaataatgtcatcggtaagccctttatgatttcaggtaatgctccaaaaacttttgaaatgtcataattgaccataatttctcctaactaaactcacttcagaagcttatcaaaacatcctacttttacgacgttacaattacttatttgtctacgtatgagaagacatcctcaccaaagtattttttagacaacttttcaagtgtaccgtcttcttttagttccttaattgccttagtatattcttttgaaaactcttcgttcttactatctcgatggaagagtggataggttggaattcctttataagggaaccaagtcaatttatctgcatattgatgatacgcaccatctttatcagttacagccttttcaaaagataatttaatatcaaagtaagcatcataacgattttccaaaacccatgcataggcatctgaaacttggaaagattccgcagatgttaactcaattggttgatctttatgcttatcgttgtagtctttgataacattccactgagcattttgtggtgagattggcaccaatcgaccattttgttttgcaaagtcagagatatttttatatttatctttatcatccttacgaatggtaaatccaataatacttgctccaattggatctttcggaataataaactttttagcacgttcatctgtgtaccacgcgcccttcgtaccgatgtcatatttacctgactctaaaccaatcaaaagatcatcatcacttgttccggtatattcaaatttgtactgtggaagctttttatcaatttcctttaatacagctacctcatagccatcagaattaccatccttatcaacaaaatcataaggaacatagttttgagtatgggcaacttttaatgttgttacctttccagaatctgattttgcttttttatctcctgttaagctacgtccaataactgtagccccaataagtgctacaacaacagctccaccaataatccatgtctttttactcatattaatctctcctttttcttacaaaattgctgcttcacgtacccattcaatacgctcatggttaatatcacttggaatcgtgcaatcagcaccaatgattaacccatgggttcctgtatcagcaataatctccctaaccttttcttgaatagcttttttagttccagtatatagaagaccgtcttttccattttcaaatcctccaagaactgtgcgacctctaaaaatgttaagaccttttgccaaactaattccttcaggaccgaccgcccaattaactacctgagcaggataatctttaaagagttcgatgttattacgggctccttcgtatccgcaaatatgtagaatattatgtcctttggctccattagctgcttctaaaacctttaattcacttggagcaatgatttctttataaatttcagcgctaactcgctcatcttgaatactttgaacacttaggtaaataccatcagcacctgcttcttcaatcaccctctgactaagactcgcaatgtcttcgccaataacatctaaaacatgcttcaaagcttttcggttttccacaatgtaatctgcgataagatcatcgccacctgaaacttttccaactaaccattttaaataagtaaccggagcgaagatattgtaaattgcaacaatatcttcaggaaaatcagcaatcagactttttacaagttcgacttgtgcagaaatccaaggatgatttgcacctaaaggttcaatcgtttgcaaatcactgattgacttaaaatctttaaaagcaggttgtgggtatgcgaagaaaccatcactcatcaatttaacaaaatcaggtttgacttcttcaataaattttttatgaccagctttatttttatcaataatttctggattttcaaaaccatataaccactcgtcttcagtagtaaaatgatgccaaaatcccaccgggacacgatcaacactttctccacgaaatgctttcaaaactaactctcttttttctgacataagaatctccttttctcttatcctaatatcaacagctaatgaacatacctaaaatactttcaactcctattatcactagctgcttcaaaactgaatgacattatcttatcagagattatcacatccgaaaaataaagaaattttatccctagccataaataaaatttatgatatagtaacccaaataacgttaaaacctattgttaccttcttttaagcacatgaccttacatagtattattaccgtcagctataagtaattcttaacaccaagataaagaattactatcacaaacaccatttaatctctagtcttcctgaaaaatcacttctctgactaactttgctataatagtctcaaacaaataaaaggagattttctatgacatccttatacgattttacagtttcagatcaagctgaccaacctgtgtctctccaggactataagggaaaggtagttctaattgttaatacagcaacaggttgtggtttaacgccacagtatcagggcttacaggaactctatgacaaatacaaagaccaaggattcgagattcttgattttccttgtaatcaatttatggggcaggcacctggtagtgctgaagaaatcaataccttctgcaccctcaattaccatacaaccttccctcgatttgccaaaatcaaggtcaatggtaaggaagcagaaccactttttgattggctaaaacaagaaaaatctggaccgcttggggctagaatcgaatggaattttgctaagtttttgattaaccgtgaaggtcaagtggtcgaacgcttttcttccaaaacgtacccactaaaaatggaagatgctatcaaggctcttcttaataactaaaaacaaaaaacgagagtgaaactagaacgacaatctttgactgtcgctagttctgctctcgttttctgcgttaagaaaaatagtatagaaagaaattttgctttattttagaacaaagctgtcaatgctgtaattaaaccaaagataatacctggtgcattggccgcagcaaggggaaggtcacgttcttttttaaagagaccatagtaaacccaaaggctacagttgactgcagctaccaatggttggataaagtttcctttatgaccagacaaattgtccatgatttgtggcacgtatgatacatacatcataactgacatgaaggttgccacccaaccaagggttttcatttgtttatctgacattcgagactcctctttcataagattctttctgccttgtacatctagaaatattacaaggcatgttttaatgcactagaattaaaacaatgtctatcttacgcttttacaatagagaattcaagaattttggggcaatgttaataagatgtaaactatcacaagattgtgattggtcacaatcttgtgatagtgaattcggtctcttatgtagcgttttcataagaaaaaaagacctctttaagagatcaatttttcataatattatcttttgctccttagaataatagactctttatgattgattataacaaaatcattctgctaagagtacgtctttgatggtttgtttttggagttttctgttggatagataaaagaggctttcataaaccacagcaaaaccgagcaagatccaaaagcacacattccagtcaaagttgtgctcaattttaccaggaactgtacctttgatcacaccgatcaaaatttccatgatagcgtattgataagctgttcctaaaataaatcctagataagcccaaaaacgatagggagcgagaatatgaccttggcattcacgattggtgtagccaaatgccttcatcaaagctaaagtttcgcgactttctgaaacgacaatccccaatgacaaaaagaggatcgagaaagaaaggatcaaaccaatcataatcatcatggtttggatgatgtcatctgtgtagtccctaaggccaaaggacaattgaaccatggccgcgaaacacatggagccaaagactacaaaaaacaggatcgattttctcccccaaatcagcgacaaagacagctcttttaggaaggatttctctttcttaggagcactttttctccttttgaccttgattggacttggggattttttcaataagcgaagggccggcgtttttagttgtcttctagcataagcaatcgcaaggaccataaagaaagtagttggcagtatcaccaaagcgaccaagagctgccaatgaaaatgaatggtaatgtctggcaaaatccccttctcattgtgaaagtcataaaaatgacccatcataagaaaagaagcgaaatagccaagaagtgctccaactccaaaactgagtccaaaagcccaaaatcgtttcgccaactggccattgctatagcccaaagcctttaaaatccctaattgttccttgtggtcatcgacaaattgtttgatataaaaacacatgagaaggatcgacgtcaaggacaagacaaccccactgaccatggccaccatccaggaaagcgagacctgggcatcatagtaagtctgaatcatgggattggttttagaaatctccaactgctcgatatccaggtaaaaattcaggaagagattggccacaaagaccgcacaggctccaatgatactgacgacaactaattttcgaatatcttttactgaaaacatggcttaccatccaatctcataggcagtctgaggctgatcattggtcacaacttcggtaatcttgccactattgacacgaatgatggttctagccatatccgcaatattttggttgtgcgtcaccatgattaaagtgaagcccagtttttccttcagtttccagatatagtcgagaatcttgcgtcctgtttcttcatcgagggctcccgtaggctcatctaagaaaagaatctctggctttttggccaaggcccgagcaatggagactctctgctgttccccaccagacaattcactcggatacttgtccagcttatcgccaagtcccaaatcctcgataatctgcaaaaaatcatgattgtttgccaggtcagctcccatctttacattttgtctaaccgttagattaggcaatagataatattgctggaaaataaaggcaatcttctcccgtctaaaggctgtcaattgagcatccgtgagttgtgataaatcttgtccttgaataaggatatgcccctcgtctaccttttctaagcctgataatacgtttaagagggttgattttccagatccagaagggcctaggataaccacatcatcctggtcttgaatctgcaaatcaattccttttaaaaccttggtttggccgtaacttttgtgaacattttctagttgaatcatttctttcctaccatttctttaatgagagattgacaaacttctgtcagtaatccaatcacttcttccatactgaactgataaataccagaagcaaccatagaagccatcccgtgagagtagataaatagatgctggtacaggcgactagcctcctctaacgtcaaagggtagtctgcgacaatcgaatccagaaccaattggtaactatgatccttcatgggaagaaaatcttgaaagcgacgaatcggatctttgctaggattttggaaaagcaactgaaagagttggggttcttttgaggcgaaaaggatataagcaaccccgacagatcggaaaggtttctcatcttctaaggccttgcgaatatactccaccacgaccatctccgcagcaccaataacctctgcttgtaactcagccatattagcaaattgcccaaaaatgactcttggtgtagctcccagtttctccgctaatgctctagccgtcaaactagccatgccctgttcgcgtaccaattgtaaagctgtcccaatgatagcctctttactaaatttaaccttgggtggcataagactcctttcacgcaacgttcgttgcgcaacacatgttgcctaaaagatatcataaaaaggaaaggcttgtcaagaaaaaactgaagaccacaaaacaaaaaaccagactaccgataagagtgtaatctggtttgataacaagattctaaggcaaatcatttcctgcagctaggtagatttggtaccattccttgcgagttagggtaacttctgctgctttccctgcttcaaggacatgctgtggcttggttgttccgatgaccgcctgcatcttacctggatagcgaaggacccaagcaagggcgatggctgtcggagtgacttggtattttttcgccaagtcattaaggacatgattgagggctgcaaactcttcattgccaacaaaattccccttgaaatagccatgctggaggacagaccaggcttgaatcaccgtatcgtttaagcgacaatactcaaagacactgccatctcgcacggctgcttttggcccttccatattgacgtgaaaaccagcatcaaagctcggcgtaaaggctgcactcaactgcaactggttgactttgagaggttgtttgactgtcgttttgagcaattccatcatcataggattttgattggataccccaaaatgacggaccttgccagcttgctccaagtgattaaaggcttctgccacttcttcaggctccatgagggcatccggtcggtgaaggagaagactatctaagcgttcaatctgcaaacgctcgaggatgccatcaacggagtccaaaatatagtccttagaaaaatcaaaataggtaaagccatctttgcgaatcccacacttagactgaatccacatctgatcacgaagatctgggcgacgtttgaggaccttaccaaggagctgctcacattgtccatttccataaatatccgccagatcaaatgtgttaattccaatcgacaaggctgcctccaccaaggcctcgacctcgtcttcactcaattcgctaatacgcatcatcccaaggacaatcgttgacaaacgctcattttcagcaaaatcaatatacttcatctctgtctccttttctgtatctctattgtaatgaaaagggtttcaaatctcaagttctagctttgatttagaatttatctactaagtagtcttagatggaaaaaaagcaagattctttaatcctgctagtcatttgtcttatcattatgattttgtttagtcagtacataaccgactgactaagttaaggtgattatttgtcgccaaaaactttgaaacggccttctgtttggatgtccttatctcctgctggtgcgacgatttgaccaaatggtgcttgggcacggagcttccagttagctggaatatcatatttttcagccaattgggcatcaacaagtgggttatagtgttgcacgttcatgccgatattcttctcagccaaagccaaccatgttgcataaagagcgattccgtgaccttgttctgaccaaattgggaagttatctgcataaagtgggaattgctcttgaaggtctttcaccacatcttgatcttcatagaagaggattgttcccttagcttgggcaaaacctttcaaacgttcttttgttccctcgaaggcttctgcaggtgtcactttttcaagctcagagtaagcaatctcattccagaaggcatctgattcttcatctagcaagatcaccacacgtgatgtttgtgagttgaaagctgttggtgtgttaaggacagctccttgaatagtatcaatcaattcttgatttgaaagttccacatcttttcccaatgcatagatagaacggcgttttgtttgtaaatctgtaaagtttgtcatcgttatttcctctttatttgtgatatatgttaattgttaagttcacttgtaacaaccttgattacaataaccattatagccgtttaaaatgtaatgtcaatggttacgactcaaaaatcaataattattaatattttttcttacccgtgtcaaattaccatcattatcctctaatgttaaggcattagaagataaccatttgacctcagctccacgattattagcacgctctgcaataacaatcaaatctcccttgtcttctacttcaacgacgtaataagcaagaccaggcatatcttcttcacgtttggccaagtttttcccaccccattcattgactgctaggtgatgatggtaatcacctgaagcaatccaacaagcacttggaatggtaaacttatctgccagctccaaaacctcctgatagaaagatgaagctagctgactatccttgactgataaatgaatatgccccatgcgagtatccttagctatcaaaaatggctcaaccttgcgtcccatctcgtaaatttcttgagctgagagttcttctgttacaccaacgatgcgaccatcctcacgaatatcccattcggcaacaggcttgtctcgatagagctcaatgccattgccctcaaggtcttccaaataaagagcttcactataaccgtggtcagctgcaccaacaaaaggatagtccagctcggcgatatgtttgaaaacatcagctagatcctcgcgagaaggtaataaaatcgccatatggtaaaggccataactggacttgaccgcctcctcacgattggtttcaatcaaatggagcaaaggcttgttcccagctcccaagataacctctttttccgtttgggagaggatttcaagacctataatctgtgaataaaaggctgtctgaccagccaaatccttaacatttagcactgcctctgctaaataaatcttactattgtaatcgtatgtcatatgatttttctcctgtattgtaatctttcatatgacaatattatactcagtttaattgtaatgtcaattattacaactcagaaataaaaaaagaaaccgaataactttcgacttcttagcgtttactgactaaactatcaagctccagcttctttccagtttgccttggcatcttttaaaatactagccagggttttcttttcaagctctttttccattgccatttgaacgtcttctaggctttggtccaagatcccatgaatatttcgtcctactggacaggctgggttaggattgtcatggaaactaaagagttgaccacttgggccgatactatccacagcacgataaacctgaagaaggttaatttcttctggggccttgagcaagctagctccacctgttcccctttgaactgaaattaagtctgctttctttagttgcgacaaggttttgcggataataacagggttaactcccacactaccagccataaagtcactggttaacttagtttcatttcccttattttgtgctataagagtcaaaatatgaacggcaatggtaaagcgacttggaatttgcatatttgggacctctcattcttctttgctattttacttgattataacaaaaagaaagttgtaaaacaaggagttacaacaacttgagaagtcaatcttatcactaaaaaagatagagccatgacagactctatctgattatgtttgatgataaacaactagaactgataaaccatattattctcacttactgaggctctagtttggtcttttgtttcttacggacaccttgcccctcaatatgctgtttgaccagatccacaacttcatcattggttggcaagtccgagtgctgagcatcttcacctgtaaccgtaatttcagtatagctctttgcttggttctgatagatatatttcccagcagacacactggcatcaggtaccaactcatccgaatcataggtgatggttcccgctaccgaataaacatgtagggtagccggaatattctccttagcagctataaagtctgctagcatgaccgatttatttttaatattggtttcagtgaaattatagggcgttccgatagtcatcaaagaatttatcttgacatcgtagtcgctaagataattttcaataaaatctgtataaatcaagccaccatttgaatgccccaaccctttaaaattattgaaattatatttattctgcaaggcttcaaatgcctgattcatcatcttggtttgtttcttgatattgttatagccatctttgttattctcaaatccaataacaatgactggctcgttatccttatccttgattttaccctcaaaggtgatacgcccattgttccagaccttgactttgagaaggctatgcttgacgccaggacgatcctgattgagcttacgcaccaggccgtcgaatctattttccgtagcggagctccctggaatcatgataatgggagacaattttgaattatagaaagtctcgatttccttgacattttttctagtccaactataggatgggacagctagcccaatgagaaagacagcgacaaggataaagaccaacttcgtttttttactgaacttcattgctttctccttcctctttcaaaccgtgttgcaccttattagacagatgaacaaagggaataaagatagcaacatcaaccgcaaaacagagcaggctaacagcaagtgcccgcagactaccaccagttccaataaaggcgtaaagaagacttggtgtaccatctggaactggataaaccgcagctggcataagatggatagacaaggccaccgcagcaatgcccatattgatcataggtgccagtaggaaaggaaccagataaactaaattaagcaagactggtatccccaccataaatggagccccattgttaaagagactaggaaagacacttagaagactcaccttcttatccttataactggttgatgctaaaagcagagccaccaagagggctagccctgagccaatgccagcaaccaagccataactatgataaagatttgttagtgtgtaaaggtggggaagcccagtcgtcgtatgatgggaaacagcataggtcaaattttccaaggcaaaactatcctcggcaattgaatttagggcaaaagcctgactatttccaatccaagcagaaaaagtgttcaaaagtcccatcataaaggttgagaacaggtgattatcagttacagtaaaggtagaggtaacctgcctaatcgtcagaaaaacattatcttgctctccaatcacaaagagaatgttaagtccaatagctaaaatgagtgacaaaaaaatgggacggacggtctttggttgataaatatagtccttgtccacaatctgatcatcactagctcttgaaaagcgaaaaatctggccaaccagatagcccacaaagatagccaacataatgttgaatgaagccggtaaattgatgcgagtcaaaacaccatcgtttagcggtgacagcaacagctcctgcgatcctataattaagctaaccaaaagggatgtcacaccagctgtaccagtacttctaccatagtgaccagctgtgtattttcctgcaaagtaggtcgataagggcccggctaagccaccaagaaagttggaaagattaatgagcacctgcccagttatcttaaaggccggtaaccattcagaaactgaaaacaattggttaatataaccaagctccgaaaagacagatagtgaaatcacccgaataattcctgaaaataggaaaaagggaaagagcgaaaccaaggttttctgcgtaatttggacgaagcctcgctcacgaaaccagagaaacctctggaccaaatagtttgtcataaaagactcctagtaaaaggcaaaataaactttacattcaacgtttttcttcattataacacaaagagagaggccttaccttaatcgtgggttaaagcaaacactctcagaatttagtcaccaccattttcatgatttcttgaaaaatttaagaaatatttgagaatttcttgatgtttatttaatgactttatactacaataaagatgaaaagaaagcggtatcaaataagcgaaaggaggcttatcatgaaaaaggtacttgagatcagacatctgactaaacgttacggccaacacctagcactcgacaatgtaaacctgaccttagaaaagggtgaggtctatggccttatcggaagaaacggggcaggtaagacaacactgattaaagtcatcactaaactcatccgccctagccaaggtagtgtttccctcttccactctacctccaaatcagagtggactcacgcactgaaacgtgttggttctgtgattgaaacaccagttgccctgaatcatctcaatgcacgtcaaaacctacgttactactgcaagattcatcacgttccaaatcctgacaaggtcattgatgaaatccttgatacagttggacttggacacactggcaagaaaaaatttcgtagtttctcactgggtatgaagcaacgtctaggtatcgctattgcactgattgcaaaaccagacctacttattttagatgaaccgattaatggtctcgacccagttgctatcaaagaattccgccaaatgattaaaaaattgagcgaagagcaaggtatgacagttctcatctctagccatatattgtctgaactctatcaagtttcaacccgctttggcattattgatcacggtcacatcatccgtgaaatcactaaggacgaattcgaacatctcagcgaagactatatcgttcttaaaactaaccaattagctctggctagtcgcattctccaagaccaactccatcaacacttcaaagtggttaatagcgacaatgaaattcatatttttgacaaatcccatgttataaaggcaattgtcaaagagctggttaaacaagaagttgacatcgatgaaatttactacaaacgtcaagacttagaaaactacttcacacaactagtagattcagaaaggaggtagagccatgttacacactattcacgccgatttctatcgactcttccgttctaaaggattttggatttctgaaattatcctagccctaaacattatttctggtgtcctattgggaggcacagggcatgtaggtgtagaaactggtgcaaaagaagccgttaaaagcgcctcttcatggactggtgtcggatcactgattaattactctagtagtatctctatgacagtcctcttcactttgattgttgtctctattatattgggcgttgacctagcgcaaaagttatataagaataatctcacctctggtatttcacggagcggattcttctttgccaaggcaacagtcattgtagcgattactttaggacaactccttttgtcttacggtcttgccttcatccttggtacactttgccatggtcttggaactgtacctgatcactttgttagaaactttgccttaactttccttctccaattcttgtgtaatctagcttgggtaagtctgaccacggttgccctctacctcacacattctatcgtgacaacctttgtgacttacacccttggtttggtagctttaaccctaccaacagcaatcttccctaaagtagaaattttgaaatacttgtcactcaactttaattacgccatgactgcagataaaactatcattcaatatactgcgatagtggcagtaggatttatcctagcattcacaacactcagcttgattacctttgaaaaacaagacttatgagaacaaaaataacatcgtgcacgcgcgcgatgttatttttattctgtgacttcaaatccgtttctctccggaggtgcgaaacaaatcttatttttgatgtagaagtgtttgtttactttgaagatatctattttatttacgagagtttgtataaatttatggattctttcaaaatctaaaatataaaaaagtcaccaacaaaagttgacgacaactaaaaaaagaggaccaatgtcagtaagggttctttacagcctgaagctgaaggtagcaccgcacccgtaccagaagttggtacctttgaatgctctgttaccagtcatcctacaatatcctctcaatatttttattctatcactgaaagcaaatagaatcaagaaaagcagtatgaataatgttactttctattttttaatagaattctagaatcaaagattttttgcaaaatcaaatcggtggttgagttgttttccgaaattattttaatctcacagttaaatagaaccattcattctcatagtccagatgcaactcaccttctaagacttggactaagtgttcggtgatataaagcccaagtccagaggaatcctcggtgtctgacaggttttcagagtaaaagcgggtcgttagttggtccagatgctgtatcggctgttgaaccatattactgactgacaaaataataccatcttccactttctctaaggtcagtcgagcttgagtcttaccatgttttagaacgttactgataatattctgaaataggcggtcaaaaatatcagggtccatttcacattggatttcagggtctacttgaatatctagtacaatccctgtctcctgaaacatgtcatagcaaggcaggatagacttaaccacaagttgagaaaagtccaggtcttgaaattgtggttggatggcaccctctgttaatcgtcgatattccaacaaggcttccaaacgctttgaaacagtcagtagatttttagaaatcttctccatagccatgtcattttcactgctacttcgaagactttgctgagcgtagccgctcgctactgtcaatggcgttcgtatatcatgggcaatattactgatagccatgtccatggttttcttttcttggagagcgacaagattagtcttttcaatttgggtaaagagagactcaacctgattcgttagggtaactaaagattttggttggtttttcagagtaatccgtctatggctttcttcaactagcttttcttcaatctgctttgagagagattttacagccaaatagtaacggactagataaatagtcactcccagaagaagtcctatcaatacaataagtagtccttccatcagtcatctcctttaagtcgcacacctaagccccaaatcgtttcgatatactccgtactcgcatccacttgggctagtttctttcgtagattactcaactgtgcattcaatgtattatcacctgatagataaggggcttcccaaaccgtctcatagaggtcttctttagtaaaaattttctttggattttgtaggagtgtatggaagatttgaaactctttcttacccaaacgaatgacttttcccttgcaagagacttcaaaactgtctgggtttatcgtgatgtttttgacctgatagatgttatcagtcgcactacttccatttctgtgttcacgtagttgaacagagacacgcgcatagacttcttcgagatcaaagggcttaacgatataatcatttgcaccatcaagtaaatactggctaatcaagtgcttatcacccaaggctgtcaacataatgacaggtacagagcttctttgcctaataaacttaagcacctcttcgccacctttacctggtaacatgatatctagaagaaccaaatcaatctcttggctttgaaacaaaagctctccctcggtcccagagtaggcttggataatttcatgttcttcagaaaacaagttaaaaagaatattctggatatcctcattgtcttcaatctgtaaaatacgtgccatgtcttaatcctccaatgatactgccaattgtatacgctcactttttctttcatcttaacaaaaagccaaattaatgacaaggtgcattacgacttattgatagcaaaaaagataaaacaaaaaccataagtctccacttccgagacctatggtcgattatttattaagcaaaagttgtcacatcagaggcgtccagacgaacagactcaaagccttcttcattggctttcccgaaagcaataattaagataggtacatgacggtcttcatcaagtccaaacgctttggcaaggccgtcttttttatagccaccgatggcgttggtatcatagccgtatgaacgagcaaccaacatcaactgcatagcagcaaggctgacatcgatgtggacaatttcattcatcattttgcgaggagcattttcatacatgggtacaatgcttgacagttgtttttctttgacctcttcaggcatttttccttgagcaacagccttaccgtagatttcttcagctctttcttgactcttcagatctgcaaaaataaggaccatggctgatgatgtttcattttgcaccccattgtagctgacaaaaggtttcaatttttctttgccttctgcgctatcaacaacaacaaaacgccaaggttgcatgttcactgatgatggtgctgtaacagttttatctaagatttccaacaattcttctcgcggaatcttaacagatggatcaaagttacgaatggaacggcggttatatacaatatctgaaaaatcattgcttactacaggcatcttatgtctcctttttatgattaaatgaaaataatataatcaaaattataacacaagacaattgttatcaaaaatatttgctacaaaaggcctaaagattggtttccttgagtcctagtcgtttcacttcagaggaatagtaaaccatgatagtaatgagacaaagcgtaactaaccagattgaccaaatgtgtataaagtgcatcagaatagctgagaaaacagcaccacctagaaaactccctacaataaaaccataattaagagcctgacgacggtattctctctgatcaccactaccctcaatgacatagtatattgctgtcaacattctgcgataattgccagacgtcataaaaatcacgaaaggatgattttcaatctgactgccagtaaacgtcttcatcatgatacctgcagaaaaagcgataattgggagctcaatcaaggcatttgaaggtaggaaaggtaggatggcagtcatcacacaaagaggaagcaagccataaacacgccaataggcatccctacgatggtccttaaaccaaatgccaaaaaggaaacctaaggaaaagaaaaaaatggagaagcaacgcaacaagttatgggacatgctattactacgccagtcagcgaccaagaggaggatattcccagtctgagtagcaaccaaactatggtagtacatatgacaaaagacatccaaggcccctcctgaaaagctcagcaaatttgccatcatacgcgtattttgaggcagaagatttcgtgactccatagcataacttcccttctaatagtgattgataggatagccttattatagcaaattcggtcacacacagtagaaaaaaacaaccctcacgagttgcttctatcctattaaaaactaacggaatcagggttatcctgagtcttgatactaatagatatcacgtctatgaccaacttcgagagcaagtatgattagttcattgtcctgaatattgacaataacacgataggcaccaatacgatagcgccattgtccagtgcgattggcaactaaggccttacccttagctcttggattatctgtgacacgattgagataagacttaatttgtttcctgacaaaagggtccaactttttaaaacttttggcaaatttaggggttggtactatcttataggtcatcccaatttagcacctccccaccgttttcaagatagtcttcatattctgctaatgccaaatcggctactctagcatcgtattcatcctcaatggcgtctaaagtcttggtacgaattaattctgacaaagatacgccttcaaatttcgcaattgcctgcatgaacttcttatctgcttctgaaaccttcaatgtaattgttgtcatatccttaacctcgttctcttttgtaacaccattgtattaccactcctcctttttgtcaattttggtaataggttcatacttttattcgtaaaacaataaaaaaaacaaccctcacgagttgcttctatcctattaaaagttaactgaatcagggtcatcctgagtcttgatgccttgaatcttatccaagattgccatgtcttcctctgacaaatcaaaatcaaagatatccaagttagcttcaatattttttggtgtcaccgacttaggtagtggcaagaaacctttttgaaggctccaacgaagggcgacttgagcaacagattttccgttgcgttcagccactgcttctacgtcttcatttccaaaaatgctacctgtaccaagaggactgtaggcttcaagaagaatgtcacgctcttggcaataggcaaccaaatcttcttgggcacaacctggagccaagagaatttggttaacatgtggcacaatttcagctgtttcaaggagagcatcgaggtgatgttgcataaagttagacacaccgatagcacgaaccttaccatctttgtaggcctcttccattgccttccaagcgcctgcattgccagccttccaagcatcattttcacgaagagctttgggatttggccagtggatgagcaaaagatccaaataatccacacctaatctttcaagtgactcgtcgatagaggccttagccaattcgtaatcatgcttgtcattccaaagttttgtagttaggaaaatatcctcacgcgccacatcactatcagcaatcgccttacctacagaaacctcgttaccgtagatttgcgctgtatcaatatgtgtgtaacccgcctttagtgcaaaactaacgctgttataagcttcttccccttctggaatttgccaagtcccaaaaccgattttaggaatcgtaacgccatttgagagtgtatatgtttccatcctgttctccttttcaatttgtaacagaattatcttaaaagatataagataaaaatgcaaagatttgctacgatgtataggaaaaaactccaaatggtagtgtgcgaccagatggagcttctattccttataattaatctctatcatcatagccttttggatggcttgagtgccatgcccaggcactttcgatgattttttcgatgttgtcaaattgtggtttccaacctagtaccgtacgagccttttcagaagatgcaatcaatgtatctggatcaccaggacgacgatcagctttctcagctggaatttccttacctgttaccttgcgagctgcttcaaggatttggagatttgaaaatccagttgaagatcctaggttgaaggctgttgactcattacctttgcggagatactccactgctaaaagatgggcatctgccaagtcaaatggatgcacgtagtcacgaacattagttccgtctggagtattgtagtcgtcaccaaaaatcatgattttctcacgaacaccttgagccacttggagaataattggcaagaggtgggtttcaggaccatggtcctcaccgatagaaccgtcaggcttagcccccgctacattaaagtaacgaagagggacatacttgatgccgtaggcttggtctgaccacttcatgatggtttccatcatgagcttgctttcaccgtaaggattgattggcttttgtggtgtggtttcaaggattggaatttcctcaggaataccataagttgcagctgttgatgagaagacaatgtatttaacaccacattcgttcataacctcaagcaacttcaccataccagcagtgttattgtcgaaatatttgagtgggttttccatagactcagccacaagtgagtaagccgcaaaatgaataaccgcatcgacatcaggattttccttaaagaccttacgcataaagtcctgatctgccaagtccccctggtagaatacagcgtctggatggactgccgcacggtgacctgtcaccaagttatccacgacaacgactttttcttgacccgcttcaaccaaacggtccaccatgtgagaaccgatgtaaccagccccacctaaaactaagattgccataaaatttacctttttcttatttttctattattataacataattctagtctacaggactaacctgagttaagtaaggggaaagaagataaaaaatggttgccaacagttagttgacaaccatttttctttctatttcaccttgacacaaagggcatcccaggctttgagttttccttggtctgcaattggctctaattcggtatttgcgatgatgacttcttcgacatcaaaattataatcaaaaatttgttcttggtctgatagattgactgcaactagataactgctagcttgagtcttacgcatataggcaaagaccttatcagctgtctccaagagttcaaagtcggcatcaattagccaatcctgcgttttgcgaagctcaaccagtttctgataagtatagaaaatcgaatctggattggcaagggctgaggcaacattgatttccttatagttaggattaacagctagccatgtttgttctgctgagctaaatccagcatttttagacgtatcccattgcattggtgttcgagcattgtcacgacccacctggcggatttggtccatgataacttctatcgatgcccctttttcgagagcttctttggcatagttgagagattcaatgtcattcaattcttccaaagttctaaaaggataattggtcatgccgatttcttcaccttgataaatgtaaggtgttcctctcatcagatgaaggaggatagccaaggccttggctgacttctcacgatagacaccagtatctccccacattgagagaatacgaggcagatcatggttattccaaaaaagtgagttccacccttgtcccaactctaactcggtttgccatttattaaaaatagccttaagtgctgaaacatccaactccttctcatactcccatttagggctatctggcttatgctgaagtccaatatgttcaaactggaaaaccatggaaagttcttgattatctggatttgaatactgtttagcaatttcaggtgttgctccccaggtttcaccaacggttagaaggtcgtgctttccaaagcttgcctggttcatctccttgatataatcgtgaagttttggaccgtttgtatcaatcagttgatctgggatcttaccaatcatatcaatcacatccatgcggaaaccaccgattcccttatcaatccagaaattcatcatgtcataaactttctggcgcaactgtggattttcccagttgaggtctggctgtttcttactaaagaaatgcagataatattggcctgaggtctcatcatattcccaagcagatccactaaagatagatactaactcattaggtttgtctcgccagatgtagaaatctcgttcaggactttctggattttcacgcgcctcgataaaccatgcatgttcatcagaggtatggttaaccaccaagtccataacaatttgaatatcacgcttcttggcttccgccaaaagctcatccatgtcactcatgtctccaaaaatatctgcaatagcctcatagttagcgatatcatagccattgtcatccattgggctgtcatagacaggtgaaagccatagggctgtgattccgagtttttgaagataatctagtttacttgtaatccccttgagatcaccgataccatcaccattggaatccatgaatgacttggggtaaatttgataaatcgtagccttgtgccaccagtatttttgcatgattctactcctcgtttttattatcatcgtgagtctgatagttctattttacgtttttctagaagttatgcaagcgttttcttttgttgtttaaaacatttcaatgacctatactccagactccttaaaattttggtaatattgaaaaataatagagttgaaatgtaaggttagcctttgcttattttaacaatacaaaaaaacgatggttaaggtattaaccatcgttttttactttttgggcaagaccataacaaagcgcctccccgtagaactttcttcaaatctatagctaagttcctcatgctctaaaaggtatttgaccacaaaaaggcctaatcctccttctttcttagcttgagctttagttgaaatattttctttagatacactcgtattttcaatgacaaaatcagttccttcattttctaaacctattcgaatcactccacccttatcagaatgcttgactgcattactgatgatatttgagagaaccaatttcaaaataggtaaattcatgaaaatactagttgccgaaagataattgtcaattgatagggagcgattctcaaccaacacttgattttgagtgagtatgcgatttaccacatcatctaactgaatccactccttatcaccacctaattcttgaacagaagataaagacaggatctctaggacaatctggttcatctcatcgacgatatcgagggagaccgccagatagcggtcccgatccttgtagcgaccaattttatctcgcatattttctaggataatcttcaagctggccagaggcgttttgagctcatgcgaagccccccgtaggaattccaccttcatctgctccaacttcagattttcctgtttctgctgctctagattgtcgatcacctctaaaagatgatgatagaggtcgttgatctgttgcttaaggacaccgatttcatcctgcgagtgaataggaagactggctgtccgatccagccgcttcatccgcttggtcatctgcttgatctcaaggatcggagcagaaatcatgcgggcatagagataggaggcaattagcgacagaacaaaggaagcaaggagactatagggaagaaagcccagactgatgtcccgcgcttccttttgcgaatcgacggtcgctaagaattgcaaggttaagtctttcccttccttggtctgaatctttcgctcttcaatcaccagggaattattctggctgtcagggttcagaagcaggtcatccttgacctctagggcattttgtttttccttgcccttgatcgagaccttgatatcattggtcttggaataaaggtcgatgaccgactcaatggtcccttcttcctgaccctggaagctcttggccagggcttgcgatttcttcaaaatcgtctggcgctgggactcgatataggtcgatggaaaaataaagtaaactgaagcatgtagaaggatgactaagctactaaaaagggcaaaggtgatcagaaagatttttgcaaagatactccgtttggtcatggtctctccaatttatagccgacattgcgtaccgtaacgatacagtccagctccagtttttttcgtagttccttgatatagacatcgatcacccggtcaaaaggaatctcctctgtctccttccagacggcatcgaggatctgagagcgggtccgggccttgccttcatgctggagcaggtattccaagatttccaactccttagcgttcatggaaatagcttgcccagctaggctggcggtataactctcaaaatccacccgtgcctctccataggtgaagacccgggaaggctggagctttttaaaaatagcttcgatacggaccttcaagagggacaaggagaagggtttttccaggtagccatctgccaactccccaaaggctgtcaacttatagtcctcgtcatggaaggccgtcagcatgaggacaggtactgagctggtcttccggatggtcttaaggacttctaagccattgagaatagggagctggatatccagcaagaccagatccggcgcttctctgtgaaagaggtccaaggcctcatgcccatcgcctgcttcaaagacctcatagccacattccatgagatagtcactcatcccttcgcgaatcaggacttcatcttctacgattagtatcttcatacactttcctttttatctatatatagtcgctttctttcattataccgttttttataggtgcagcaaacttatcattcaacatcaactaagaggtctttgggtttcttgtgaagaagccagcgagaagaaattaaggataccaagcttaagataaagccaccgactagaatgactaccaaaagttgcttaggttggactgtcatatgaatctgagtcagagtcttactgaagctctctgcctcagcccctccaccgagatttgcagctagagattcttttgtcatttgcttattgataccttccgtaacattggaaaggactgttttaccaactttttcggcaaagaaactcgctaaaccatatgataaaagaaaggctggtaaggcaatcatcagtaattccattaaaaattgacccgcaacctgtgtctttttaagtcccaaggccaaaaagataccaacttctctacgacgagcatttaaccataaaatcaacaaaagggttagcaataaacttgtaaaaatgagacttccaataaacatacgatttgccacacgatacatcccaagaatagattcctgtaaagcagggtagtttgatgaactcttaacaagatcgtagagggtccagttaatgtccaacttttgaatctttgctatcaaggaatcaagattttgatcgcctttagcaaagaaagtggcatcctcataagtggcagtttctaccgtatttccatagagttttgcagctgtgtctagatcagtgatgagggtgttttcatacaactcctgagcgtaggtaacggctgcttgattttgaccagaaaataaacctttgatagtcacttctactgtttcatcagcccttttttcgttatcagcatcatagagattagatttaagctttactttatctcctacattaagaccattctttttagctaaaccttcgtgcatcaagatttgattatggtccttatcggttagatgttctccttcaactagtttataagcacctgaaacaaatttatcttcttttgatgagtcattgactcctgtcaacatcaaggtagacttaaaatttttagcacgttctggagactgattttgtagcgtttgctctgtttcgataatctcataatctagtaaatcaccaataccatttatccgttttatagtcgaaacaatccctttagtctcactaatctttttaatatcttctcccttaagatttccagccccacgaggagttccaggattcgtgttacgattaatctgcattgaaaaactattggtaattgagcctagactcttggatgcagcttcttgggttgcacttcgcatagcaagtcctaacaaactaagagtactcatcaaaagaataataattaacagtaatagtgactttgaccattttcgtgtaatatatgcaaaagcgtttcgaaacataagagtcctttctttattttttcttttctatgagttgtttcttcttcaactctaaaaccacatcagatgcctgagcaacttccttactgtgcgtaacaactatgacacatttttggcgatctaaggccattcttttaaggatagcaataatatccttcgcagtttcctcgtctagatttccagtcggttcatctgctaagataattggagcctctgaaaccaaagcccgcgcaatagctacacgttgttgttgcccacctgaaagttgcaggacatttcgattaatttgtttttcatctaatcccaattcagaaagtatcttcctatcggcatttttattaacaagtcgtacattttctaaaggtgtaagataatcaatgagattgtaattttgaaaaacaagcgcaacatggtgtctacgatgataactagagccttttttcttgatattttctccattaaacaagacctgccccttcttgggataatcaagacctgccaaaagggaaagtaaggtcgattttcccgctccagattgcccaataatactataaaatttacctttctcgaaacgataattcaccttcgagaggatagcttcacttttattttgataactatacgtaacatctttgagttctaacatagtgttcctttctccttaactcatattagataagatttcttttggagttttacgccaaatgagacctgttgtcacaccgagcgataatattaccaagactagaagacttagataagattggcctataggtagtccctgaggaatttgatctaataactgaagagcctgctgctgtccttgctgtcctataaattcttgcaaaaacagtcgacttagtagccgtccaatagcaagggcaggtagcaaagacataagggacaccaacaatatctccataagaaattgagcaaaaatgcgtcccttgctcttcccaattgctaaaagaatacctatctcatgatttcgctcacgcgtccatagtgccattaaaaatgagaggatccctgctcctgtaacaattaaactaatcatcatcgttctgacgattccttgtagcgctttagacgattccttcaaggagtcaaaagccttacggtcctcgtctaaacgtagacgattccaatcgatatccaattgttccacttgtttaatgacttgattgattctatctggattcttaataccaaaggataattttgtcactaacttatcagtcgaattaagcagttggctattatcgtcataatggaggaagatttgattttcacttaaatctgaggacattccagtaaatgtctcctccttcttgccagaaaaaataccaacgatatcaaaggtcatttccctagctccactttcagtcatctggaaattggacaaggtcagcttatctccgacgcttaacttatttttcctagcaagcgattcatgaatcataatttgccttttagcagatatgtgcttccccttaatgagttgaaaagcaccactcctaaaatcaacactttgtcctgtttccttagtaaatgtggctcccaaggcttgattagcctcattatcaagatcatcacgttccaccgtttgttttcctgtaactaccttcttatcgataagtcgcaccggacttacatattggggtatcgttgaaatcacatcagatagatgactaatctttgccccctctttccaggaaaaggcactccctctttctttacttaccaaatcaaaacttgccccacttgacttcctgatttgtgcctccattcctccaccaacttgcataagagaaaaacaaaaatacaagcaagataatatcaaaaataaaataagaaaaaggataaaattccgcgtttttttgcggaaaatataagcaactgcctgttgtaagagaaccatcttccacctccatttaagacattggccctcagctacaccaaagataaatgaggactcttcatttttcttatcctaattatagacgacaaatgtgaaacctttatgaaattcaatattctaaagtgattgttatctaaaaatctaactgctgggatgagaactccaattaaataataactctaaaggactatcataaaaaatacgtttcatgattgacttcacctctttttctcccataaatcgtccttcgctaatagcatttaccctcggcatttgatataatttttctcagaggtatttttatttatgaagaaacaagcttttagttctgaacagtatttgaatctgcaacgcgaccatattttggagcgcattaaccagtttgacggcaagctctacttggagtttggtggtaagatgttggaagatttccacgctgcccgcgtccttcctggttatgaacctgacaataaaatcaagctccttcaagagctcaaagatcaggttgaagtggtcattgccatcaatgcaagcaatatcgagcactctaaggctcgtggtgaccttggcatttcctacgaccaagaggtccttcgtctgattgataaattcaacgagctcaatatctatgtgggttctgttgttattacgcagtattctggtcaacctgcagccgatgctttccgtaaccaattggaaaaaaatggcatcacgtcttacatccactaccctatcaagggctatccaacggatatgaaccatatcatttcacctgagggtatggggaaaaacgattatatcaagactagccgtaaccttatcgtcgttactgctcctggtcctggttctggtaaattggcgacatgtatgtctaacatgtaccacgaccaaatcaatggtatcaagtcaggttatgctaaatttgaaaccttcccagtttggaatttgccgcttcatcacccagttaacttggcctatgaagctgccactgcagaccttgatgatgtcaatatgattgacccattccacttggaaacttatggcaagactacggtaaactacaaccgtgacatcgagattttcccagtcctcaaacgtatgcttgaacgcatccttggtgagtcaccttacgcttcacctacagatatgggtgttaacatggttggttttgccattacagatgatgaggctgccaaagaagcttctaaacaagaaatcatccgtcgctactatcaaactgtacttgatttcaaaaatgaacgtgttcctgaaactgctgtcaagaaaattgagttgctcatgaacgatcttggcatcactcctgaagatcgccaagtggtcgttgcagcacgtgctaaggctgaagaaacaggtggttctgcccttgcgcttgaattgccaaatggccaaattgtcactggtaaaaattcagaactctttggtccaactgcagctgctttgattaatgctatcaagacttctgcaggtattgataaggatactaaacttatcgagcctgaggtggttaaacctatccaaggtctgaaaattgaccatctgggtagccgtaatcctcgtctccactccaacgaaatccttatcgccttggccattactgctgccaacaatgcggatgcggcccgtgccatggaggaacttggtaacctcaaaggttctgaagctcactcaacaatcattctaaccgatgaagacaaaaatgttcttcgtaagctcggtatcaatgtgaccttcgatccttactatcaatacgacaaattgtaccgtaagtaattcatgatttaaaacaagaaagacctcagttttaccaactggggtcttttcgaaatcactttagctggagaaagaaaaaagggaaactctatcgagttccctttttgataacccactctttcgtctcgacccgttcccaatgaaaagggagtggcctagcattattatgaaaaagtgagttaaaggtatcaaacagagggctaagccactcccgattctaatcagcctacgatttctaacttgagaaaaggtaagctaaaaagcaaaattatagtagataggacagcaacaagtgggaggtaacgacctccaacaagataaagtaataatggcgctatcgctataaagcgatttagaaaattgctagtaacacggacaatttgcccatcctccaccgtaatggtgttagacttgtaacccaattttccgacactcaaacgagcttttgacgatggtaggaaaacgctcacgtcttccactccagaaactgcccccacaagactactgtctacgcgaataggactctttctagctaccttgctcgcttctattgtaatactagccactagtcatctccttttcctatcttttcatttatagtatacaccttttgaaacgcttacacaagggaaatgactgttaaatcaagatttcttgaaaatgttttatgttttcaaaagttcttaaaccgctttgagggactttggaaatattggtttttaaatagtaaaaagggctcagtcctatctaatacagaactgaaccctttcctataagaatttgtctatcctgtttggataagtgccagagggggataatattcctatacgggaatggtggcactttccctacaaaagagcaaatttacttaggctaatccatgaacataagcatctacagcaacgatggcttgcgcaatatcagaagctttcacctcaaatggcatttgatgaatagtttctccttcgattgttgcttgttgaccaaccttgagaagatcttcgtaacttgcattttcaagatgcatttctttaagagtggttggcatgccaatttgttgatagaaacgaatgtatttatccaaaacttcttttggacgattttctaggaacaattgtacaagagttccgtaagctactttttcaccatgagtcaaatggtgaatatcgccagtgagggctgtgaaaccattatggatggcgtgagccgcagccaagccaccactttcaaatccgataccactgagaagggtattggcttcaatgatgttttcaagggcaggcgttacaacttttgcttcacaggcggccatggcttgtaaaccatctgcaaaaaggatttcttcacagcgttcagcaatggcaacaccagcaagtgtttggtgtttgcctagcatggtttttccattagcctgcataactgctcgagcttctacccaagttgctaagccatctgcgataccagaagcgagcaagcgttttggcgcttgagagataaccttactatcaaccaaaaccaattctgggttcttagaatagaagatgtagcgttcaaaggcaccctcgtccgtatagataacagacaaggctgaaacgggagcatctgtagaggcaatggtaggagcaatcactactggagattttagaagatctgcgatggctttagcactatcaatagtcttaccaccacctaaaccaatgactaaattacagcccttttctttggccaaacttaccacacgattaatttcattatccgaagcttcaccattaaagaagactggaacaactgtaagtccattttgaacgaggtattcttcgaaacgtttacccacaatgtcataaactactgaatcacacaatagtacaggatgacttcctagttccaaaatggtttttgcattttcaaataaggcgttttcaccttgaatgtaacgcgacggacttgcaaaatttctcatagtctttctcctttgacataaatgtatttatatagaatcaattaaacgaccttagttctatggaatatagagctaaaaactcactttaattgacagcatatctatttggagtcagtacataagtctaattttttactctgttttcaaaactcctactcttcttctgggtaggtcaaaccccagtctttacggagttgtgtcatgagatccatgacatctcggctgtaattgaggtaggtataatcatcctcgcctgcaacagctgcttccatatcgaggacctcatactggagggctttagcggtttctcctgcttcgatgacttcttgtgagccatcttccgtataggtgatgaccgccttttgcccacgtgggtattcataaagttcgatatagcccttgtcataggcgatagtaccacgtttaggctgtttggcgtgaagacttagcgtcaccgttgccatttccccttctgcattggtaaggagaatacccgcttgttcatcaacaccagttggagctaatttaacctgtgaaaccatctctgtcggttgcgacgtcatgaaccaacgtacaaaggaaagggcatagacaccgatatcaagcaaagctccaccagccaagttacgattgaaaaagcggttggtcatgtcatattctttataggaaccaaagttcatctggataaccttaagaggtcccaacttaccactttccacgatttcagaaagtttccgataaataggcatatggaaaatggtcatagcttctgccagtttgacatgattttcttcggcgagttgaatagcttctgtcaattcctcactgtttagagtgatagatttttcacagaggacgtgcttgccagccgcgagggccttgcgaaggtaattaatatgcgtattatgaggcgttgagatatagataatatccacttcagggtcttcaaagacttggtcaatctcttcataaaccttttcaatgccatatttttcagcgaaggctactcccttgtcgtaggtacgattggctacggaatagagtttcccgccaagagcttccaaggcttgtgccaattcgttggcaataacaccagttccaagactagcccagttgtacttaatttgatttgtcatagttttcctttattctatttttgaatagtcaattcattaatctgagataagatttcaacctcactcgctcctgcctgaagcaaggctgcagccgcataggccccctcaatgagaggtacctgttgaataaggatttccttgtctgaaaattcctcaagcatttccaagttcatacgtgcactgcccaagtcgtaaaaagccagaaggcgattggctggctgactgtccacagccacttgcacatggtcaaaactagatcccaggccgccatcttccagaccacctgtagccgtcaaagggatatctggagcgacttcacgaatcaggctcaccaaacctttagcaatatccgcagagtgggacacaatcacaattccaagttctggcatatcctagccctccgattctagcaaggctttgaagagtagaccagacgaataagagcctggatcaatgtgaccaattgaacgctcacctacataagaggcacgccccttggtagccgcaacttccttggttgaaagaacagcttgatcaatgacatcattggtgagttggccttgtttgacagcttcaacaaccggatgccaaacatccaccatggtcttttcaccggtttctgcatgaccacgttttttaatcatctcgagacccgcctcaagcactcctgccaaatcttgaccagcttgttcagccttcatcatgcccataaaggcagacccataaagtggacctgaggcaccaccaaccttactaatcaaggccatagagaccgccttgaacacttctgctgcactttgtggttcagtactgttaatagcctcaatggctgctgccataccacgcgccaagttagcaccatgatccccatctccaataggaccgtctaattcagacaagtggtctttttctgcttcaaccctttgatcaaagcattgcatccattttactgcaactgttttatccataatatacctaatttctagttttcatgtcagactaccaagcgatggtcttaacaggactctccagagcctcaagccaagcgtcattttcaatcttcatgagcgtcaatgaaagacctgccatatcaatcgatgtcatgtagttacctaattttttataggccacttctagtccaacttctccaagaatgcttgctacatcgttagcaaagacatactgctccatgagaggtgtcgcacccataccattgatgagaagggcatagcgttcacctgccttagcctcaaaggcttcaaggagtttccctgtcaattcttcagctaactggcgagatggctgcatagactccttacgataacctggttcaccatggataccaataccgtactcaatttcatcctcagctaggacaaaaccaggcttaccaacctcaggaacggtcgcaccactaagggccaaaccaatggtgtggatgttaggaacaatcttatcagccaagtccttgatttcagccagagacttaccttcacgagccgcatgacctaggattttgtgaacgaaaatagtacctgcaaccccacgacgaccttgtgtatagaggctattttccacagcaatatcatcgtctacaacaacactagcaacctcgatgccttccatttcagccaattcttgagccatctcaaaattcatgatgtcgccagaataatttttaacaaccatgaagacaccagctccttggtccgctgccttgatagcttccaaaatctgatctggcgttggtgacgtgaagacagcacctgcaatggctgcagaaagcataccatcacctacaaaacctgcgtgagctggctcgtgaccacttccaccaccagaaatgagaccaacctgaccagcagcctgctcatttcttgcgatgatgtcaaacccctcaacacgatgtaccaaatcactgtgaacataagccaagccatctagcatctctgtcactacattttcaggtttattgataatttttttcatgggattgcctccttttcaaaggtatcaactatttgcacttacattggcttccttctatgattgctcatttccctataaataaaggacttcaaggctttttgagaaagacagcgtaaaaatatgtaaacgcatacattttataatttaattgtagcatttgcctctatcaatagcaaggcaaaaggcaagacctccattttcctgacttctatcattaagtagaagaaaaatctcatagaaagtcctattttagtcgccaaagctattgaaaaaccaccattcaaaccttataatggagtgacgaattaagcgataaggaggttcaaatgaccatcgattttccaagagagacagaaatagaaactaaaaacgaaatggatgccgtccttcaggctggccgtgtccttatggagagcggtgctgagatttaccgtattgaagacactatgggacacatggccaagtctcttggcatcagagacttttccacttacgtggtcaatcgaggggtcatgatttccggactcaaccgctcaggtcttaaggagtctcgtgtcctagctacctcagctccttctatccatctgggcaagctcgaggaagttaaccgcctgtctcgtgaactggcagagcagccaaatcagcctgtggctagtattttccaaaagctgaaaaccatagagcagaagactttctatcatcctttagaggacattatagcctgtgttattggtgcagggagcttttcgctagctctgggaagtagctggattgatggaactgctgcggctatatcaggactttttgtagggattggtatgcagctcttttcacgttttattcataccagtttcttgcaaattatcctctctagtgccattgctgctttatcagccaatgttctctactatctaggaatcggccagcatcgtagcgtgattattctgggaaccttgatgatcttgattcctggggcctactttgttaatgccatacgtgaattcacccagaacaattactatagtggtctggccctgatgctgtctggggtctccacttgtctgtctatctctgtcggtgttcttgccatgatttcacttcttccctttgcggaacaattatcaggcatgttctcaacaccatctacctcatggcaggaggtcttgattcagaccttcatggccgggctggggacagcagccttctccgtgctttaccgagttcccaagaaatacttcttagacctcggaaccctaggtgcaggctcatggctcctctacctcttgatttggaacaatacccatcacgaggtccttgccatcctcttccctgccctactggtcacattcacctcacgcttcttggcccactaccgtagatgtccagctacagtcttcctagcctcaagcatgttcccacttatcccagggatgagcttctaccgtgcagtctacttcctcttgattggaaattcggacctaggtctcagcttcctacgagcttgtttcctggcttcatttaccatcgctatcgccgtcagtttgacacaacaaatccctagccgctattttgtactagggaagaagaaataaaattttgaaagccattggttttgtatgccagtggcttttttgatatttcgattaagtaattgacaccaaaaaaggtagccctaaaaaagctacctcgcaaaatctacttcaaattaaaatattccttaacatctttagcatagccatactgctggtttaaacgatcgattaagtctttgttatgccctggataattgtcatttcttcgtaattcttgataaagctcgatataaggcaactgtttgtctttggctaactgcaactctgcttcataatcataggcaatctttcgaaattggagattagtaacaccatcttcttcgacatcgactatggcatactgagccctatgattttgcaggggtgaccaatcaaaatagggcatcccaatcgtaccaggattaagaatctgttgccccttactaccatagcgaagcaattgcttatgcacatgaccgtaaatcgccatatctgtttgatcatctagcaactgatcaaattgactggtatcgttagctggacgtaactcgcctccgtaattcttctccggtaagtgatgcgtcagagaaaaacgaatcccattgacttcctttttcacaaccagaggaagggaacgtatccaatcaacatatttaggatccatctcttccatcaagtactgggtaagtcgcaagagctgaatttcttgagggtcccccagaccatactccccatccaaagcttccaaaacgcaatcatcccaatttcctcgaactgtggctgttataggaatagaagacaagagctcaaatagttcatttctacctggtccaggtaacaaaatatcccccattaaccaatattctgtcgcacccaactcttgtgcatccttaataactgcttcaagagctgttgtattcccatgaatatctgacaaaattgcaatacgatgtttcatctatactcctttactgatggtctactaagtaaaaaccaatacaacatcaactattcttcctcaccatcaccctcatacaaacatgccactaagcgttcaaagggctctatatactcccaatactcaaaagggagattggaaatcttacttagatcattatcatcaaaatgatacacgagatggcgtagtatttgattttcaatataatggatatctctcaactgctcgagaccgattgtatccaattctatgatgtagtgacacaaatcatcaagtgcctttacgtcaaattgtttctcctcgtgtaggaagtagagaaagctctgattctcacctcttttattatcttctatcagattccttttatgcatcattcttgaatcctttccttaatagcaacattataacactagaaaatgattccccaaagcgacaacataaaaagagaatctggaatgtttccattccaaattctcttcttcttgatttccaaaatagcaagactttttaccacaaactaatgcgtttgcttggtgctaagtacatagcatccccttctttgatttgagggtaggcctcataaaactcaggaaggtttttaagttgttggttaacacgcaactcatttggtgcgtggacatcttgtaccatggtatatttgttgtactgtaggctggccttttgtttccagatatctgcgtagttctcaaagtaatccttgaggttaggttttgtcatatctgttttgagaacttgtagtgtggatgagagaccaccagcatctgcgacattctcagtgactgtgagttttccatttaccttagtcccgtaaatttccaaaccattccactggtcttcaaaggctttgatcctcttgtcgaaagctttagtatctgcctttgtccaccagttatgcatgtcgccattctcatcataatcggctccattggagtcaaaggcatgggtaatttcatgtccaatcacgacaccgataccaccatagttcttttcagtactttggttcttgtcataaaatggagcttgcaaaataccagctgggaagttgatgctattgctttctgggttgtaataggcattgatatcaaaagcagaaccagaccatttattcttatcaataggatcatcaaaatgatcaatggtataacgttttccgaactgggcaatgtcttctgacagttcaaagaaggacttgttagggtcaagatgtagttccttagtaccaggatcgacatcttcctgataacctacgaaaaccttcattttatccaacttttcgatggccttgttgcgtgttccttctgtcaaccaattattctgttgaagacggccacgatagacatttttgattttatcaatcatatctgtcacatcagtcttggcttcctcaccaaagtatttacgtccataatagacactcatgacatcactaaacagatggacactcatctcgtaaaccgtatcttccttagaaactggcttctgtgtacccataatagccatactaatcgattgaaaattcaagcggtaatcttctgtcagagaatttgaggctgccatagcttcttgcaccaagatccatgatttgattttagaaaaattgtcctgattgacgatcttactataattctcaaaatacttggtattagggacattgatggtttctaaatcacgtcccataatgcctttaatgacatcatataacttgaaggaacctgagtaggcattaatctcttctgcagttttaggatgaaccaaattcttactttcagacatctcttcgttactgagactgtacttagcaatgatttcgtcaaactccagtgcttctttgacaatgcgtttactatttttttcgctatatccaagcatttccaaggctttttgcgtagctgtttcaattggagtcaaatattgtttcttgctggcctcgtctttataaatagacacatctggcaataagatacttgggggactcaattggatttgtttttggctggtattctctgcgttagttcctacgtcataaccaaatggaagaggaatccctttatcagtcaagctagcagatttattggctaaatcattcagatccttgatatcctcaatctcttttagataaggtttgagaggttcaaggccatctttctcacgttgcttgtaatcactagcagccttgtagaaggtgataaactcagacatccctgtaatatctgacgtttccttgccctcccctaaatttttgatatccttttttagctttcctttaatatcttcatccaaagtataaaaattatcaatggttggggaatcagcgggaattttggcttttaggagccagtccttgttaacagcttgataaaaattagaagctaccgtagcattcttatcaattggcgtttcttgcggaacaaaggttttataagcccaaaaaccgcctccagcaagagctaaggccaaagctcctgttatggagccaagaataatttttttacgctttttcataaatactcctcataaaattaaattaatatatttgtattatatcattagaacacttattttagcaagctgtttttgggagacaaaaagaagtaatcagacgattacttctctttattttcttaaatagcaaaaattaggtattacgacaccaaagataagaaccataaaagatcatctaaaagacaaactgccaagtgatgttaatccttttgctagattaatgttacgctctgatttttcttggaattctgtgagcgtcttactcaagtcactcactccagaactcagtgatttgcctttagaaagattgctgactgctagagcttgaatagctctacataattctgcaagaagttcatcattatccttcttctcagcttctatttcatttttatacgttacgagcaactctctctcattttcagttgtttctggatttacaatcagattatagatattgtttaagatatccgtaatttgcgtgttattgctttttgtcatttagattacctcctataacctgtagcaagattaggtcgagcaagtgaattaaattggttaattgtttgtgttgtcatgagcaacgacctcttttaatagatcgctgtgacatcattatacacatctagcatatcaaattcaagactaaaaatatccttctgccacaaatggtccaaatttagcacaaacagataaaaagaagtaatcaaacgattacttctcagattgaagaaaaaatccattttaggcaactttcttcaatctgtttcttttagagtataaagtgaaaaactcttataaattccattacatcaatattcctaagagatttaactacgtggtaaccaacttttaaaagggcttgcctatattctgaagtaagcacatcgagcggttatttttctattactttattgacataaaatcatatgtctaacgctattccttatatttttctatcattctttatgatacaatagcatcaatttatttttaggaggataatatatgacttctactattggtattgtgagcttatctagtggaattatcggtgaagactttgtcaagcacgaagtggacttgggggtccaacgactcaaagacctgggactcaatcctatctttttacctcattcgctaaaaggcttagactttatcaaagaacatcctgaagctcgtgcagaggatttgattcaggccttttctgatgatagcatcgacatgatcctatgcgccatcggtggagacgatacctatcgcttgctaccttatctttttgaaaatgaccaactacaaaaggttatcaaaccaaagatttttcttggcttctcggataccactatgaaccaccttatgttgcacaaactaggtgtcaaaactttttatgggcaatcctttctagcagacatttgtgaattagacaaggagatgttgccctatagctttcactactttaaagaattgattgagactggaaaaatctcagaaatccgccctagcgacgtttggtatgaggaacggattgactttagtccaaagaccctgggaacagctcgtatcagtcatgtaaatacaggttttgacttgttgcaaggaaatgctcagtttgagggagaaattctcggtggttgccttgaatctctctatgatatctttgacaattctcgatacgcagacagtacggagctctgccaaaaatacaaactcttccctgacttatccgactgggaaggaaagattctattgctagaaacaagtgaagaaaagcctgaacctgatgatttcaaaaaaatgttgcaaactataaaagaaactaggatatttgaggtcatcagtggactcttggtcgggaaacctatggatgaaaccttctatgacgactataaggaggctttaatggacatcattgatagcaatatcccgattgtctataatctgaatgtcggccatgccacaccaagagcgattgttccctttggagtccacgcgtatgtagatgcaacggagcaagtcattcgctttgataatcacaaataaagctgggaagaatttctcagctcagattgaagtaatcagacgattacttctttttattttcttaaacagcgaaaattgggtaacaagatactcaaaataagaactataaaaatgcccaaaaccataattgtagtatagggattaaagcagaaacttattagcaaggcaagacttattccaatcattaggtatcccaactttctcactactgatttactgctctggttatgattttttgtagccaggccaatacttttaggaagataatttccaatcactagaaaaataagtgccactaaccaaatcacagtcaagcgaacttgaacatgacctcctaaggcaacagtcaatataagaccttggataagcacagtagagattgggaccaaccatagcataaactcttttaagaatggaatcgttatttgtttaaagaatgaaaaacaaagattatatatgattaacgcaagaaaaggtagggctactattgctagattgcggttcataaaaccattggcttgctcttccacattaaagtggatagcaatctgatttggcagttgtttgtaaaagactagtccgacaataaccggtgtaagtatcactatattaccaatgactctttgcatattatttttcatcttcttttcctccaagtgattgaatccaagttaaaatttcttcaaaaacggtcaggtttaaactgtagtagataaaattcttctgcttttcttcttcaataagtcccgattttctcaaggtagacaaatgatgggaaactgttgcgggagctaaatcaaactgctggctgatttcaccagcggacttgggtccagactttagatagtctaaaatttctctcctcacaggggcagagatagcttttagtgtttcagataagcccatgagttccctcctttctccaaatccgacgtgtcagaagtccaatacctaacacataaatagctaaaataagttcgattagtaagagattgctgactatccctagctgataagcacctgccaaaaaatcaatggcagcatggagtataattgcccagaaatagaatgaaagtctatgcttagtgactgctagaaaatcccaagctgtaagcaagacttgtaacaccaaggcaactagtctttcaaagagagacataaccacagcaaagcctgttaattggttgacctgactcacaagagttgaaggtaactgactggcctgacctgaatggatggcctgcaaaacaatgatgttagtgagtaagcccatcactccaaggaagataaattcactaagaccatgtccaaaaccgtaggctacaatatcagacgtcatcaaacttcttttctttgcaagtaccttaaaaaccaaatagcgagttgtttcttcaacaaggccagccataagccctccataaataatggtgaaccatttagaagagtgaccaaagcttgaaagaactagggcattgataggtccttcaatcatcatgacaggtaaggcaaaaccaatcagaccgactaaaaagagcttgattgaaaattgccatcttttcttcagaacgataaaactaatgacggcgataaccaacatggtaagaattgccataaaaaggaatgtttccatttgatttatcctttcattgaaacggagcatcaatacgacttaggtcagaatacctatttctatacttttcgaaatagattctacgcttttcatagactactgtcaatactatttcgaaaaaaatcgaaatagggatacaaaaaaagaccgttttcacgatctttcttcttgagaattttccctcattctcggctgtgtgttctctagtcaattacatgggctactactgcttatcttcctgggacatattcgccagtgttggcatcgtagtaacgacgttggccattgactgtgacgtaggcacctttaacttggcgacctgattggtcaaagtaaaggtgttggccattgatgacttgttcccctgtcacggcatagccatctgctccgaaataagcccagacgttaggctcgatttgagcgaagcggttggttacaggttgaccatcgttttcgtcatagtacttgtaacgactaccgaccttaactgctttgcccttgtattggataccattttggtcaaagtagtattccttgccattgatagtccacttgcctttaagggcttggccatcagtattgaagtaagaccattggtttggtgcaatctcagcaaagctgcttgttacaagagctccactgtgggcatcatagtaataagtcttaccatcttcaacaatggttttacccttgacttggataccatttttatcaaagtacttaaggtatccatgatcagcacgaacttgaccgattgccagtgaaccgtcttgtttgaagtacatccactgatcatcaccaacttggaggtagcgtccgctagcaagaatacctgattctggctcatagtaatacttaatgccattttcttcgataatttcacccttagcttggctaccatcttccttgaagtaatagaggtgaccatcaatgtattgacgtccagtgacacggttaccttctttatcaaagtagttccatgccttagttgctgggttgtagacaaagatgctgcgtccaatttcgcctgctggtgtgatataacgcgccttaccattttcaaagataatagaatcagctcggttgctgtaggccgtaccgacactaccatcttggttaaagtaataagtcttaccgtcaatgacgcgtgagcctgtcacagtgttaccatcagcgtcaaagtaataacgtttacctgtgctgctatcagtcgcaaagacattgcgtcccatatcaccggttccagcaacatagtaatgcaatttaccatcatcggtacggacaatgcgatccttagcctgaagaccagtttcacggtcaaagtagaaatggtgaccactccaatgaaggttacccactaccatggttccttgtgttgtaaaggcacggacttgcttacgtttatcatcaaaatcaacgaaggcattcttaaccatggcaccgtctagaccgtaatagtaggtatagccgttgctagcacgacgaagggcattacgcaattgaacaccattatcaaagaaatagtaatccttgctattgatgttttgggcacccttggtcatcttaccgtcagcaccgaagtaataccagttaccgttaccgtcttgaacaaattcattcttgatgacttgattatcacgaaggaagtaaacatcttgtccacgacgttggaagacttgagtgcttgtgatggcacctgtatcacgaagtggtgttggcaagagttggccgttggctgaagtattaaagtactggttggtcttgtcatcacgaaggacaaagttgatgcctcgtccaaggatgttagttccgttgaagtacttagcagaccatttggtaatcttttcattcgtaggcaattgcttaccatttgagatttgcacacggttgaaaatagatgggtacttagctttcagctcatcaaggaaggcaccaccgtacttgccttgatagtctgtgccatctgtgcgggtatttgccacataggcttggtccacaatttgataaccttgttggtgataaccgtagccgttaacacgtgtggcattaactacttcttttcctggaaggttataaatttggtctggcacccagtcagcaatggcttgaataccatctttgtggagggcacgaaggacattaaggaggtcatcaagtgagccatacttgttattttgactcaaggccatatcataacggtcgtcaaaggcataaccattgtcaattgttgaatcaaggaaggtaccatccttacttgaaacgtactgtggtggaagtccaacagacgtaacaccccaagctttgagcaaattagtgttcttagccaagacacggttcatgtaaagttctggctgatcgtccgcaaaagcttggaagtttgagaaggcttcatacatgacttgcgaatcaagggctgctgaagacttgtaaacttgaccatcgctattggcacggttacttggctgtgtacgtgcgtcttggttagccttagccccgactggtacccagacaccgaggtaacctgatacttgcacattttccacaccaaaaatatcattggcattgaaggtcaagttcccattccagtcggtacgtttaagaaggtttgaaggtacatcagaatcgttgaggtaggttgctagaccatccttagtcgtcaaaagcaatggacggtaaagctgattacggtgggctctacccatattcatcgttacagtttcattgctacccaatcggaaatcatagttgttggtcatgatgacacccatcccttgcgtacgggtttcagcagttccccaatcagttctgttattggcacctttaccataacgaactgatgtcaagaggccgtcatttccgactttcttcacttccatgtcttgaccaccagctacatacttgatacgggcacgcaaaagggtatcgatggcatcaaagtaaggcgtcttcttggccatgtagtgaccatcctcacggtagaggtctccataataaacacgtgttacagagtccttgttggtcaacatgagggcatagacagatggcaagttgtaagacgcataagtcttgtgagctgtattgatatccgcattgtaaatctcgaaggccttcttgatttcatcacgggtgaaattgtaaccaaacagatttggattgatacgatcacggatgatacgttggataatggtttgcgcttcagtatcgtgggcacgggtgaaaatatagttggccatacgctcaccgtttttatcgttagcaccacgtggattcaaactactattcataaaagcagtcatgtccccaagctgcatacgtgtatttttatcacgcatcaaaaggttggtaagagcattacgaagggcattatcaatcggcagttgtgcccctttagtatccttgttgtaatatgggtcgttagcagaccacgcttccaagtatgacaagtgtttgatcgcattagcttcggacttgtcaacaccataggctgctttgaagtaatctgaagcgatttggagaaggtcagcatccacattgtccaaagcatcgacacgcaaaccgtcaaagttagcagttgggtcattggccatgatacttccgatattcatcataaagtggagccagttaagttgctccgcctgaacagctgggtttgagttatcaatatcgttggcaagcaagaactcaagaccaccgatagaattgtccttgaagtacttacgtgtacccgtctgattagtcggtgtgcggttaagtagacgataatcagagttggcgtagctagtacggttaccagtatcacccttactgttgttaaagagcaactgtccaccttgcaagtggtcgtatgaactattttcagtgctactattccaacctggctgagtcttgatgaactggtcgatacttgtacgcaaccagttggtattgccttcacgcgcaatacgttcttcaatcttagtctgaacagctttagcagctagatttagactttcctggctagagttggttgaaaatgatcccgcaccaagaccttgattttgcatgtagtttaggtagttaacctgagttgatttgtcaggccaccaaaccatcaagagtggacgtttgtccgcttcagttgaagctgtccaagtcttaccatccttaagaatactctttggacggtaccaagcatctgctgtgatgaaggtgtcgagttggtccaaagatttgttatcgtttttgtagagctgatttccagatgaaaaatccacagttgccttgataggttctgttgaaaattcatcctgtgacttggtcgcaagagcccctgtttcagcatcaaagtaatatgacttcccatcttgctcaaagacgaagttcttacgcacactaccgtcactattgacatagtattgtttgccgttaatccattggataccagtcgctgtattggtattggcttcacgagtttctgccaaggcacgacgactacgtgtacgagcttctgtatttgccgtctcagttgttgctgcacggtctgttgtagcagcattagtatttgtatctgtagttgtagcactcgtatcagctgtagctggttgtacatttgtacttggtgctgcttgacctgagttggtgtcaactgttgctgcgtttgtggtaggtgctgctgctctatctgtgacagctgttgtcgtgctagtggcgtctgcgacaggtatgttgacactagcagtattggcatctgtcgcgatagttggtgctaccgtagttgctgcatcattagttgtggcaggtgtttcttgaagcaaatcctgactgctatcacccgactgattcgcaggattttgctcatcggcctgaacctgttgatccgccaacaaggttccactagcaacagtaaccattgagagtgctgttaccccaattgtcacccaattcttcttcactttatgcattttaaagcgtactttttgttccatattatatacctttttcccttatattatttctatcataagctatttgacaagagaatacaattacacaactataatatcagcttaatgtatagcccctggttttctaagaaatcaggctcaaatgaatggtagacgaaacgaggaattggtaactaacggtatcattaggttatagcccctccaagcatccgtcgtaatacaacaatattaatttatttttaaacaaaaaacccttcatttctaagatgaaataaagagtttaactagaggtattgacatatcactatgaaaacctgcgtgattaactctgattggtgtttttactcactttctatttactaccacctagtaaaaaaggcacctatggtctcaataattgcatagaggaatgctttttttcgtgttctggaatctgttttataaaagtaataattcgaaattaaaagaaataatatgacaatgataatccaagccaagataagcatgattttcctcctctagaaagtcaattacacctcgagtttaacgaaaatagtcccccataactacccctaactctattttcctaaatacaactataatacccattataacacggctatggctccttcttttgaatatgagagggacaaaattattaggatttaagcatgaaaaagcatctgggtgtacactgacagtttctctaaaacaactcaaaaaccagctaatgctggctttttcgtctatttattcatctagagttatgataggaaaataataataatttagataggaaaaggaaaaattcgctctagattttaaagtacatagtaattaacgacgctgtctcaattcaccagttttggcatcgcagaagaggcgtttaccaccaacataaacataacgtcctttaacttgacgacctgaaccgtcaaagtaaagctgtttgccattgatgacatgttttccagtcactgcttggccagctgagttaaagtaataccagcaaccacgtccagcttcgacaaagcggtttaccacttgctcaccagtgtgggcatcaaagtaacatttcttaccttggacagtgagcaatttacctttgacttgagcaccattgctaccaaagtagtaaactttattgttaatattttgaagacctgtaactttgtgaccatcttggtttaggtacgcccattggttagccgcaatttgaatgaattggttgatgactgcttgaccagtgacggcatcatagtaacggccttcagcccagccaccttttaattggctgtggtctttgttgaagtaatagagtttaccatcaatcacttttgcaccttgaacgagacaaccaaaagcatccgcataataccagttgttgttttcaaagataaagcgtgacacagccatttcacctgtttgggcagaaatgtagtattgcttgttgccttgttgcatcatctgacctttgatttgacggccttctgagtcaaaacagtattctttaccattgatgatacgttttcctgtcacagcgtaaccatgttcatcaaggtagtaccaagcttggttttctttattttgaacaaaggtatttacagccatattaccagtatcagggataaagtaacggatacggccatctgagaagcgaataaatttgtctttagcttggatacctgtttgtgtatcaaagtagaaggttgtgctacccatttcaaggagaccagtagccatgtgaccataacaatcgaaatagcgtacatccttacgataacctgcaaaatcgtagaagccgttgatagctttcacaccatttttatcgtagtaataagtgtaaccatcgctacctttaacaagtgagtcacgagcttgaagaccattttcaaggaagtaataagccttaccatcgataaccttctcacctttgaccttttgaccatattgatcgtaataataccattgattttcacctacacggacaaatgaagacttggcattgtttgaatcaacacttggtttagtctcacctgtgatgatttggtaacctgagttattttgctggttaccttgtgaaatgatagtgacattagcatttgaaccattcgaatgccctactgatatgtttggaaacagtttattagaattcgaaacgatagtaacattcggcgtagttcctgaggctgtgatggtgattgtcgtgtttcgaccaccattccaatgaatgccgtttgagtcagacgaactcgtcgtaattgtcgcaaaaccgctagctgacgatgatgatgaccatgatgatgacgacgaataagaataccaagctgagcttgatgagcttgaagaacttgacgcactagcacttactgatgccgagctgctacttgattggtaagcagaacccgtttgtgatgaattagagttttgtgttcctacgacttgagaagattgtgacgaactgacttgactagatccaccacctaccacagtctgtgatgagcctcctgttgaggcagatgatgaagactcgtagcctgagcttgtttgactgccatagttagatgacaccgctgacaaatggccagcatcttctgtcaaggttggtgaatagctttcattaatcaatgatgcacttgattcaatgcctgaatctgtttgttcaaaaccatcaccattaggaagtgacacttcatctgcttgtgccgattggtctgccaaaagggctccacccgcaagtgcaaccatcgacagcgtactaactccaatagtcacccagtttttcttgaccttgtgcaacttaaatccaactttcttttccataacatacacctttcaatataactttatttctctattctatgttaagggattttggaaacgaatacaattatagatgcataaccctcttctcataagactaaccttctacccataatccatttgaaaaaacaagcttaagatagatacctatagcctttataggttagaaaacgttaccaaaaaaacgttcggattttcttaaactcacacagaaaatccgatgtttagccattttagctcccccgtcattagaggactgagtatagtttaaagcgaaagtaagtagtttattgacgattctattaatcaaactcattgtttgtttacaatccactagacatttcgaggggaaatgataaaagaaaagtacttgaaggaaaatacttcaagtacttaaaagttttgaaattatgtggaaagctactgattttcaatctataagcttctgggatagtcccaaaaatacattttttctacctacttatcgttttctgacccaagctccagtattggcgtcatagtaacggcgttggcctttaacccagacgtaacggcctttgacctgacggccagaagcgtcaaagtagaggtgttggccgttgatgacttgttcaccagttacggcttggcctgaggcgttaaagtaaaaccaaacaccacgagaaatttggataaagcgattagttacagcttcaccactattggcatcaaagtaatatttcttacctttataggtaaggagtttacccttagcttggacaccattaccttcaaagtagtaaagtttaccattgatatgttggagaccaactaccttttgaccattttggttgaggtaagcccattggttggcaccaacttggacaaagcggttggttacggcctgacctgagtcaccatcatagtaacgaccgttggcccaagcacccttgacttggctataatcattgttgaaatagtagtgattaccattgataacttgagcgcctttaaccagcttaccattgccatcgacatagtaccacttgttgttttccgtcacaaagcgtgaacgggcaatttcaccgctatcgccatcaaggaagtaacgttggttattgatagtgacaaagtgtcccttaacctgacggccttcattgtcaaagtaatactgcttaccgttaatggtttgtagtcctgtcacggcataaccgttgctatcgaggtaataccaagccttgttctcaggattttgcgcaaaacggttgactgcgagatttcctgtatctggaatgaagtaacgtgtgcgtccgtccgcaaagcggatgaacttgtctttggcttgaatacctgtcttttcatcgaaatagaaggttgtgccatacatgtcgtgaaggccacgatacatttgaccgttgccatcaaaatagcgaacatcttggcgaggacccgcaaagtcgtagaatccattgaaggcctgaactcctttaggatcgtagtaatagacgtgaccatcactgccttggcgaaggacatgacgtagctggagaccattgtctaggaagaagtatttcttaccatcaatgacctgttcacctgtgaccatgttaccgttcttatcaaagtaataccactggttggcaccgatttgaatgaaggtattcttagcaaggtagccactcgttgagaggtattggaccttatctccaaccctacggaaaccagttgctgtgatttcagtcatttgtttcggaaggaaggtttgacctgctttcaggttgaagtattggtttgttgcgttgtcttgcaagacatagcgagcccctgtaccttggatattgcttccattgaaatacttggctgaccattgcgtgattttctcattggttgtcaatttacggccgtttgaaatctgcacgcgctcaaagatagctgggtattttgccttcaattcatcaaggaaggcaccaccgtacttgccttggaagtcatttccaaaggtacgtgttttagctgcatagagactattgtagatttcggcatttggacgtggtgtgccgtagctgttggtacgtgaagctgttaccacttcttttccaggaaggttgtaaatttgatctggaacccagtcagcaatggctgagataccttctgcgtgaagggcacgaagggcatccatgaggtctttgagtgaaccgtatttgttgttcttactcatggcaatatcgtaacggtcctcgaaggcgtagccgttttcaatgatagaatccaagaaagtgccgtcttggctagacacgtactgtggcgcaaattcaaaggaagtgattccccactctttgaagcgtttggcattttgagcaatgacacggttggtgtactgacttggtgtcttaacgaaatcttggaagtttgagaagccttcgtaaatgacttgtgaatcaagagctgctgatgattcaaagacctgctcacccttcttagttgtcgaagccttggtgcgggcatcttggttttcagaagcacctactggcacccaaactgccaaataacctgaaacttcaacggttgaatgaccagcaatatcgtctgctgtgaaagtcaagttcccttgattgtccgtatagcgaaccaatccagctggcacatcagaatccttgaggtaggtcgcaagacctgtcgatttgctgagaagtaatggacggtaagcctgatttttgtgggcagctcccatattgaccaccaaatgatcatttgctcccaacttcatatctggacggttggctgtaaggacgagcattccttggttgcgtgtttcggcagtaccaagctggttggcttcttctgctcctttaccataacgcacagatgacatgatttcatagccattaagcttagtaaccttcatgtcttgaccacctgctacatatttgatgcgagcacggagcagggcatcgatggcattatagtatggtgatttttcagccatgtattggccatcgtcggtaaagagatcaccgtagtaaacacgagtgatactatccttgttggtcaacattgtggcataggcagctgggatattgtactgggtgtactttttatcagccttgcgcatgtccgcattgtagatttcaaaagcctgtttgagctcatccatagtgaaggtgaaaccatctgtttttggattaatctgcttgctgatgatattagccaaaacagcttgcacttcactatcatgggctcgcacgaaaatataattggcatcacgtggcgtgtgtttctgctcacttgaacgattgttaagagagttagtaatcacgcgctccaagctgccacggtaatttctcttacgcaagaaagtcgtcaaaagcgtttcacgtagtggattgtcgatagacaactgagcacccttggtatccttgttgtattgatgatcgttgtaagaccaagcttcaaggattgacaagtgggcaatagcgttggcttcattgtctgcgacacggtatttttccttgaagtagtcagaagcaatctgcaagaggtccgcatccacattgtccaccgcatcgatacgaacaccgtcaaagttggcacttggatcattgccaaggatagaaccaatgttcatgatgtagtggagccagtttagttgctctgcctgaacagctgggttagagttgtcgatatcgttagccaagagcaactcgtaaccaccatttgaacggtcaatatgatatttgcgtgtccccgtttggttagtcggtgtgcggttcatgagacggaagtctgagttggcatgactcgtcgtactattattgaggaaggtcagagcgcctccttgcaagtggtctttaccaactaagagattgtcttcactctctgagttccagccaggctgtgttttgatgaagtctgacatcaactggcgaagccatgtgatattgccctcacgaccaatacgttcctcgattcctcgttgaaccgtttcggcagcagctgccaagtcatagctcatcatatctgtcgtataggtcttattaccaaacccttgttggctcatatagttgaggtagttgacctgtgtcaccttgtctggccaccaagtcatcaaaaggggacgataatctttctcagttgaagctgtccaatatttcccatccttcaaaatctgttttggacggtaccagctatcagccgtcaagaaattgtccaagtgttcaaaactcttgcttgacgtgtcgtaggcctggttataaaccgcatagatagagttatttggaatggcatcggcacgatacaaaggtttactttgatctaccatcgctccagtttcatcgaaataataaagacgaccatcaagttcaatcgctgtgttctttttcacaacgccattttcaacatagtactgcttgccatcgatagtcttcaagttagaggctactggtttatagtcaagacttggcggatttggttggaccggcttgttaggttgagacggttgacttggttgaacaggtttgttgggttgatttggctgcgttacaatggtcacatttggtcttgtgccatttggacttgtcaccgtcacgtttggtttaggcgtgtttggccctgtgataatggttacatttggtgtcgtaccgctggccgtaattgtgatgttcgtattgcggttggcattgatacgaatagtgctatcagcagctcgtgtggcgattgatggcgctgcattggtcaatactctaggagtggactgagttctttcttgaacagttgcctgaccttgtgaggcctgtccagcggtctgtgtttcttgggtgctaacttgagtttgtgaagaaactgccacttcctgactggcaacttgactgttttgtgcttgagcagttgcctcttgactaaccgcacttgtcaccacctgagagcttgtttcgtgacttacgctggctgttgctactgctgacacacttgcttgggcactcgcttgctcagtaacagttgtggtcgtcactagactggcagtgccatcctcactcagttgctgcagaccatcaccatttggcgtacttgtctcatcggcctctacttttccttgagctagcagacttccacctgccaaggcaaccattgagagggtcgtcaccccgatagtcacccagcttttcttaaccttgtgtagtttaaaacgtaccttattttccatctatatcaatcatcctttttctgttgttgtctctactctatgatatattcagataaattacaaataggaaaaagtcatcttttcttcataaatctctgccacgcgctcagttttattaactttgattactgaaaatgagaccttacaccgcatgtgaggtcctaaatagaaagttttcgattttcaaacaccttcaaatgcttatccttaaaggcttttgaacattaaagtaagcttcaattaaccttaagagatagcaaaactatgagagaagtaacccttaaaaagataattctgaaaagaaatttttagatagaaagactactttttttcatctgactaagaccatgatctatctatgaggagcaaaaattaaaaatataaatgatttacacaggtgaattcttatttgactaacgaaactaaatatagaatcttttatgtcacttctttaacatttttgataattctattagtttctattgtttattcttaaaaaaggattataatgaaactaggtggacgtgtaagcgttttaattttgcttcaaaggacacttggggattatctaaaagattggcattagttgcctagtgcctaaataagaatcatagtaggatgaccattcctgagtcactttgaaccatcaaactagggctcatttctaaaaaatacagcattatttcaaactagagctctagaaggacgcctcatactagtaagctctagttttttgtgtcttagaaacccaaaataaacgagattttccatgcttagaaaggaggaaaatttcgaacggctctcgtttttctagaatcatttcatcaggactcatgtttgccttgaacagcctcacaatacaaaaaatgaggagacttggaaaaataaggattgtcattaaaaaattgccccacaactttagggactctacccaatgctcacttttcataaactcttatgacagcccttattttttgatatgtaaaaagtttaaaatgaaaggagaattatcatggaaaagaaagtacattttaaacttcacaaagttaaaaaacattgggtaactattgcagtgacaggactcactttaggattgagttttgcaggccttaactacgcttcagctgaagaacaccctacccctgttaatgaagcgactgttgaagccatcatcaaagaaggcgccattgacgtcgaggctccagcaactaatgaagccacagctaaacctacagaaaacacacctgctaccgcttcaaacgaggctgccacagtatcagaagcaccagtagctgcctcagaagttgcttcaacagaaacagtctctgaaaaactaagctctgaagtgacaagcacagctagttcggaagcagctagttctgaaactgcacattctgaggtgagtgctagccctgaagtagtcgaaaaaacagtagttacaggcggtcaatacactagcgatgaccaaggtaactggtactatgttaaggatggcaaggcgcttactggtctacaaactattgactatgtagacgtttactttgatgctgatggtaaacaagtcaaagacgatacccgtcagattgatggtagtacctatcattttgctaaggatagtggtcaaatcacgcgcaatgcctttgcctctgacaaaatgggtaattggtactactttggtccagatggtaaagcacttactggtaaacaaattgttgataacttcacactctacttctaccctaatggggttcaagccaaggatgcctttgtcattcttgatggcaatacctattatttccaaaaagacagtggtcaactggttagcaatcgttattggtctgatgacgaaggcaactggtactacagcgataaagatggtcgcctcttaatcggtgctcaaactgttgattttatcaatgtctacttctatgacgatggtgtccaagtcaaaggagactttgcaccaaatggccattattatgataaagatactggtgccctcgttaccaaccgctatgtcgaaaaagatggaaagtggtactatgtcaatgataagggcgataaattagttggtcagcaaaccgtagacggtgtagaggtctatttcaataaagacagtgtccaagccaaaggtatttttgccaatgctgatcatttctatgacaaagacacaggtgccgctgtccgtgaccaaatcgtcgaagtagatggcaaacgctattatgttggtccagatggtagaaaagtttactcaggaacacatattgttcatggtgaagaagtgaatcttatcgttggagatggccatcaggccttcggagaattcacaggtcacggagatagtggagactatatcggatttgatggtaaaaaggtcacaaaagctggtttcgtcagaaccaaagataatcactggtattatctagacggtaagggaggcaaattagtctcagttcaagttatcgatggcgaactctactattttggactccctactcgtaaatactactacggaatgcaaagtagaggtgagctcatctatgcgcattacagtgatcttaccccttacagaacccacatttactatctaaacgaatcaaccggcgctgctcttaaaaatcagtaccatgaatgggaaggtagttggtattactttggtccaaactggtacgccttgactggtgaacaaaccattgacaacgtcccagtctacttccacagtaacggtaaacaagccaaaggtgaactagtcaccgtcgacggtaaaattcactactacgatgctaactcgggtgcccgtttgtcaaacattaccatcactattaagggacaaacctatcattttgatgcggatggaaacggaacaccaattagttagtgaagttatagacactccttctcaataatgacagtttaaaatgaaaggagaattatcatggaaaagaaagtacattttaaacttcacaaagttaaaaaacattgggtaactattgcagtgacaggacttgctttgggattgagtttcgcaggactcagctacgcttcagctgaagaacagcctaccgctgttaatgaagcaactgttgaagctatcatcaaagaaggtgctgttgacgtcgatgctccagcgactagtgaagccacagctaaacctgcagaaaacacacctactaccgcttcgagcgaagctgccacagtatcagaagcaccagtagctagctcagaagttgcttcaacagaaacagtctctgaaaaaccaagctctgaagtgacaagcacagctggttcagaagtagccagcccggaaactacacattctgaggtaagtacaacgactagtgagagtgttacagctgagaatgtgtcatctgttggtgatatcccaaacgaaaataccacgagaggaattgaccgttctgcctttactgaaaaaagaaatggatttgtcaccgaacaagaagaacgcatcgaaacagttaactatgtaggtagtcttattaccttaagacatccttattacgttacttattactacgataataacggtaataagcttatgggatggcaagatattaatggagaacgctattatttcaaaaaagagcgagaacatcctggtttcgaaaccattgatggaaaactctattactttacagatagtgcacgtatgctccatgatgaatttgttgaagaaaatggtcaaacttactatctaggtagcgatggtgtgcgagtttctggcttacaagatatcaaaggacaaacctattactttaatcctgatagaaacgaccaacttagctacggattgaacgtggttggtgacaaactctatctttttggagatgctggcaaagaaaatccggggcaattagttaaagacacacatctcaagaatggtgacttccaactaaatattgatgctagtggcgtcgtaacattagctaataaccatccagcttttctacaagataatgctgggcattggtattatatgaatacagatggaaagctagttactggaccacaaactattgacggcttaacctattactttgactcagatggtaaacaggtcaagggggaacgccgtaaggtcaatggtaaatcctatttttacgacccagataacggcgcccttgtgacgaaccgcctcgtcaccttcaaagctggacgatttattcctgaggaaaactatgctaaagaagtaagatttgacgaagctgtatattcaaattttttcaataatgaacatcctgaactcgaacggtattattttggtgccgatggcctaccagtcaaaggatggcaaaccatcaatggtaataagtactatttccaagatgatggaaatatggtcgtgcacagatttttcaataactattacttctacaatgatggtaccattgctagaaataaacgattgaatattcctacacactatattatgagagaatttccaaatatctatgaatttgataatgatggggttggtaaattcatttctagtgattttaaggaccttcgacctaagagcgctcatttttctcaagataaagagggctactggtactactacgatgagtatggacttcctgctattggtgccgtaactattgatagctatgagatgtatttccatttaggaactcatcgccaagctaagggagagttcgttgatatcgagggcaaggtttactactttgataaagataacggtcgaaaagtcaaagatacaacttttgatttcgatggtaagacctatgtggcagaccaatctggtgtcctcagcattaaaagtcaatcaactgaacgaaaccgctatatcagtgattccgaaggtaactggtactatgtaaatgacaagggtgacctcctccttggtgctcataccattgataacgtcaacgtttatttcggcaccaatggtgttcaatataaaggccattttgctcctgataatcactattacgataaagataacggtgctttagtaacagatagattggttgaggatgggggcaaagagttttatgttgataaagaaggaaataagtttgacggtgctaagtatttggacggaattcagtactactttaattacggtgagaaagtgaaaggtgacttcggctattcaaactacaatagacactactatgacaaaaagactggtgcacttgtaaccggaaaatacttcgaatacaaaaataactggtattatgcaaatagtaagggaaatattctgactggtagaagagttatcgatggaaagcatgtctacttctacgatgatgattatggacaatataagggtatacaagctaaagataaactcatcattttaggtggtaagacttactattatcttcctggctctggtaatcgtgctgataatgtaaccttgacaatcaatcacgttacttattactttgataatgacggggttggccatatccttcgatagtcatttacaagtgactatggtcaattacccaacacaaaaggaagtcgaccaactgtcaacttcctttttcatatcatcaatcacaatcatacaaatagaactcgaatatcaacaattcttaaacaattacgattatcttgtaaaaaaacttgtttgtcataaaaaaagtattataataaagataggtgaacatgtaagcgttttactaaaaacgttgaaagtgtactacaggggattaggattaggaacttggctttagacttctaacgtcaaaataattttttatgcatgaaaaccggtccttaggcactttggcatgataatctaaggctcttttcatacacacatctgtctataatataaaactagagctttagagataatgcctcaaataaaagctctagttttttgtatttgaagacatgtgcataggctggattcaataattaaacgaaaggagagaaataaaagtattaggataaaaaaataaaatcacttgtttctagatataaactacacagcataagcatattctccttgccacacatttgacgtgctcgcctataaaatcgtcttatggccatgccctgagagatttagatatggggctcagtcgttttaatagatttgctcacttttaacactcttctgacggcccagctcctttatgttacacacctaaacatcggtgttcatttttgaagggagtctattatgaatactgaaatgaattatcattggcaaatgtccaaaaaacacgtcgtagcactttcttgcgcaactgctctagctacttttactttagtcgcacgccctacatttgcggatgaagtaaaaatacctgaagcgacaggtcaaccaactgagattcttgcacctgcacaagaaactgtagtaactaatgtagaggtcaaagcacctactacaaatcctatctcaactaatactgagctacctactagtaccagtacggttcttagtgaagctcctagtagtgaagtcgcatcatctgaattagcaagcgaatcaccagtagaaatcacttctgaacaagaaattagcaatcaagataatcagacaaataaagctatacctattaaaacggcaacttcagaagcctctactacaaaaacttcggtagaaaaagtcaatgaacctattactgttgaagaaacaaaaacacctacaaaaaacagtgaacaacctgccccaatcgatgaaaatgaaaagccagtcacaccttctgtaacacttgaaaatgcacctcatatttctggtggacattattatagtgatgataatggtaactggtattacaaggatgcaaatggcaaaaatcttgtcgggctgaactatgtggataatgttcctgtttattttagtcaagacggtattcaaatcaaaggtggttttgcagaggatggccgatactatgacaaagattctggggctctcgtaaccaaggcatttaaagaactcttaacttatattggtcgtgatgatatcaacaatcaaaatatctatactactgattggtactacctcgatgccgatggaagacctcttaaaggtcctcaaaatcttggtggaacaaacatgtacttcttccctaatggggcacaagttaagggacgtttcgcacctgacggacattactatgataaggactctggtgcgcttgtaactaacagctttgtccatgtctacaactggaattatcaaaatcaagacggaaatcgtgtgaatcactttgtcatcaccattcctaataattcagtcgttggacctaacggtgaaaaccaatttttggatatgagtcattacccactttctagcaatgatttgaatcgcgaagatttctactattacgtagatgacaagggggataaactgacaggacctcaaaccctaaacggcatccatgtctatttcgaccaaaatggtagacaacttagaggtgagtttgaatttgacgaagatggtactgttcattactacgatgcgaaaaacggtgcacgcgctgaaaataccattgttagaacaaatactggtgccttcaaattcgatgcaaatggtaatggacatttgatgaaacctggtgaagaaatagatacccccgtcactcctacacctaccgtctccctagacaaggcaccacgagtttttggtggttactattatagtgataaccagggcaactggtactacaaggatgcaaacggtaaaaacctcatcggtctcaacttcgttgacaacattccagtctactttgacaaggatggcaaacaagtcaaaggacgttttgcagaggatggtcgctattacgataaaaactctggtgcacttgtaacaaaacgctatcttgaaactgaagatggcaactgggtttacgtcaatgataaaggtgataaactcaagggagaacaaactatcgatggtgttaaagtctactttgatgatttcactggtacacaagtcaagggacattttgcaccaaatggtaaatactatgacaaagattctggtgctctcgtaacaaatgcttttaaagaaatcttgacttatattggtcgtgatgatatcaacaatcaaaatgtctatactactgcttggtactatctcgatgctgatggtaagccattaacaggacctcaaacctttggaaatagtcgcttttacttccttcctaatggggcacaagtcaagggacgcttcgcccctgatggacactattatgataaagactctggtgctctcgtcactaatagctttgtccacgtctacaattggaattaccgaaatctcgatggtgaccgcatcttccacttcactattaccattcctggaaatgatatcgtaggtcaggatggacagtacccaagagaaagtaaagatttagatcgtgaagatttctactactatgttgatgctaaaggggataaactgacaggacctcaaaccttaaacggcatccatgtttacttcgaccaaaatggtagacaacttagaggtgaattcaaatttgacgatgacggaactgtccactattacgatgctaagaatggggcacgcgctgaaaataccattgttagaacaaacactggtgccttcaaattcgatgctgacggtaatggacatttgatgggacctggtgaagtttaggaatataattcaaataacaactattgatatcgcatgattactctcatttaggaatcactaaaaaggaagtcgaccaactgtcaacttccttttttatatcacaagtaaactttttcttcccctttaagaaaactttaggatttgctttatatactataaccatcctaaaacttttctttttcataatctcctaaatccagggcctaggtcctggatttttttgtgtttaacttaaaaagtactaactcggaaagcaaaaaaaggttcctattatactaaaattcaagtataataaatcgtatagtatttagaataattaaaaaattgtttttttatttataaaacatatatttggaggtaattaattgaaaaataaactcaagaaaaatgctctctggggacttattccaattctctgtcttattgctgcttattattttctagcctttgctccccatcaaaaggcagtcgactccttcaataatattgctcaaaaggtaaaaaataagaataatctcttagaagataaaataaagacagcaaatcaactcctaagtaataaagacaaacctttagatgaaaatctttcctctgaattaaaaaatgaaatcacttctgctgagaaagcaaaacgaaaaattcctaagatcaaaaagtcaacaagtgacattaacaaacaggtagaagtacttaaaaaaccgttagattatacaactgaaataaagaaactcgatgagctaaatcaaaagtattcaacaagtgttaaacaactaaaacaaataaccaacccttctagtagctttatcgaaagtagacttaaagaaattgataccattacaggagttcagtcagcaaccgaagataatgatccaaataagggattgaataaacaaggtagttacacagcatccgtgtattttactgatagtttagttactgacactattgaaggaaaggatattgtaactaaaggaactgatgctggtggcaatatcgaagtctacaaaacagttgaagatgcacaaaaacgaaatgagtatttgagtgctttcgacggactcccagctatgttaaatcctggatctcattatgtttatggtacgattatcatccgaacttctggaagattgactgctacacaacaaaatgacctaactcaaaagatttatcaaaagttgattgagattaaagatggagatacaagcgaaactagtcaaaaaactgaaaccaataatagctctgaaactagtactcaaactaacgtaacaacacaatctactcaaaagaattcaggtactgtctctagttctaccaccgaaaatactacaaatactgcttctagcgaaaaacaatctgaatacctcagtaatattgatgcaaatggctataacaagcttactggagaaaatatctttgagaaaaaatccggaaatcctgaagatggtcctgagtaccacagtttctttgatagaaatggctataacagtcaaacaggtatgaatcttaatgattacgttgtacccaatgatagttccactggcataggatggtcagacggtcaatagttaattcttaaaaatactcacctactactttaagaaaactttaggctttgctttatatactataaccatcctaaaacttttctttttcataatctcctaaatccagggctcgggtcctggatttttttgtgcggtcaagaaataaacgatgtcataggttttgagctattgcttttcttcttttgcctgatggatcatatctaggaaataagcatgtaccctttcgtcacccgttaattctggatgaaaagatgtcactatcatctgcttttctctagctgccacgatagccccattgacttgtgctagaatctccacttctggtccaacagcttcaataattggcccacgaataaagaccattggaatctcgcctattcctttaaattcagcatctgtgacaaaactgcccaattggcgaccataggcatttctggctacagtgatgtccatacttgccaaatgttttgtttggtctcccactatggttttggccaacaaaatcagacctgcacaggttccaaatacaggtaaccccgtatcaattttcgtcttaatcggctcaaacaagtctaaatcatgcaagagtttccccatgactgtcgactctccccctggtagaatgagcccgtccaaatcagcgtgagcttcccaatcctgtcgatttctgatttgaaccgtttcaaccccaagtgctttcaagacctgctcatgttctgcaaaagcaccttgcaaagccagtattccaatttttgtcatctattttcctcgctctgccattaagatgtcaatttcatccttgttgataccaaccatggcttcacccaaatcttctgacacttgcgccaaaatatcgggacgattatagttagtcactgccttgacgatggcttccgcacgttttttcggatctcctgacttgaaaatccctgaaccaacaaagacaccttcagcccccaactgcatcattagggcagcatccgctggtgtcgctacaccacctgccgcaaaattgacaacaggcaacttgccatgttcatggacataacgaaccaaatcaattggcacctgcaagtctttagcagtaatatagagttcatcttctctaagattttgaatacggcgaatttcttgattcatgagtcgcaagtggtgaacagcctgaacaatatcaccagtaccaggttcacccttggtacgaatcattgatgccccttcagagatacgacgaagagcctcaccaagatccttggccccacagacgaaaggcacatcaaatttggttttgtccacatgaataagatcatcagccggtgtcaaaacctcactctcgtcgatataatcaatctcaatcgcctgcaaaatctgtgcttcaacgaaatgaccaatacgcaccttagccatcaccggaatactaacggcgtcctgaatttccttaatcatcttaggatcactcatacgtgacacaccacctactgcacggatatcagccggaatgcgttccaaggccatgaccgcagctgctcccgccgcttcagcaatacgtgcctgctcaggattttgaacgtccatgatgacgccccccttaagcatctgtgccaaatttttatttaagtcgtaacgatttgtcattgcaatcacctctcatgtttttatgccctttattttacacaggatgatttttgaaaaaaagactctatttcccaaactgtatggggacaattaccatttcaagcatatctatagacgaaaaaataaataaattaggaaaactcttttataggctataactatcacgaatataagaatctttttataaaatcatggcgtttttgtatccgttttctattgagtttattagaaaataagattaaaatataactgtaaattaattttggttttcatgttgttttaaatgtcacaacatgaatttaccaagtcaccatataagggggaaaattatggaaaacaaagttcgtttcaaacttcataaagttaagaaacattggatcacaatcgctgcctcaagtttggctattggggcttcactaattggactaggacaggtcggagctgatgaagtcaagcctgaaacaactgccgttaacagtcctgaaaatgtcgtctctgacagcaatcttgagacaagtgctagcctcattacaagaaccgaagtggctccaacgagtactgttgtcgggaatacttctagtgaagcagtctctactgacactacatctactaatgtggctagtcagcctgcagaagcaactgctacacagcctgctaacgagactgataaaaaggttgaaaccgctcaatctagtgaaacaactattgctgataggagcgcggaacctgtcaccgacaagcaaaatacaaatgaaaataagtcagagattactgaggttagtgagcatccattatcaggacaagaaatctctatcactcaaggaaaattcacatccgacgatcaaggcaattggtactacaccaaggacggaaaaaaactcactggatggaataatgtagaagatcgcgaatactatttccaagaagatggaaaacaggtcaaaggccaatttgttgaggtaaatggaaagaactattatttagatgaccatactggtatgctcttagtcaattgctacctcgataaagatggaaaacattatcaaatagatgagaatggggttgtgacagagagaactaaactgcctacaaacattactggtggacattttgaagccaatgataagggggaatggtcttatatcacttcacaaggtgaaaaattgactggtttccaatatgtggacggtgttgaactctattttgacaaagatgggaaacaactcaaaggtcaagaaatcacagttgatggtaaaacatattacttagatcaaaacaccggtgcccttctcaaaaattcttaccgtaattggtctgaaaaacagattatctcacggtataaaacaaactacatttaccatactagttacttcaaccgagatggcatacgtgccacaggtctcgttaaaacagcagctggtttcattcactattttgatgaaaatggcgaactgcttaagaatgtagcggttaatgtaggagacacaacctatgtctttggtgagagaggacgactagctcaaaactcctttatttgggataaagtagatctcatcttccctgaaagggttaatttttattatggtgatgaaaagggccacgctgttaaaggacttcaaaccattgatggttaccaactttacttcgataaaaacggtcgtcaagcaaaagatgaaattgttcagattgatggtaaaacctattactttgataaaaccaacggacgtatggttaaaaatcaatgggcctcagtcaatgttggtggaattagtcctgcatcaaaggactaccgttcatactatctcggaaatgatggcgctgctgtgactggatggcaagatattgatggaaaacacttgtacttcactgagaccggtctctatgcacataatggtatctattcaatcaatggtaagaattatctatttgatcctaagggacaattagtcaaggatgcttatggcgatgttgttaagccagggtctaaagtgaggtttaaatatacctaccgaactaatgcagatggcgaagtcctaactggtaaacaaattatcgatggaacagagtatgtctttgcttcagatggtcatgttgtcgatggtgtcataggttataacggcaaactttatctagtcaaagatagtaaaatagaaaaaaactattttggagccttcttttctaaaaacgaaattttgggtggaattaatttcactggaatctatggaactgatgaaaacggtgtcctcctagagggtgtccaacgaggcttagatggtcaactgcactacttccaacctgaggtaaaaagtgttaataaacctacatggaaagaaatcgatggtaagcgctatcgtctaacaaaatggtatcttcctgaacaccatgctggtatgtacaccactattatcctcactaatgatactttgaaagtcgatgacaagacctacacaattgataatgagggagttgcaactgagtttacgaccaaaaaccaatttgttcgtgatgacaattggaactggtactattacgatgctgatggcaagctcctaactggtcgtcaaatcattgatggtgttcaactttactttgatgctaacggtaaacaagctaaaggtactttgattgacattgatggtgacacttactactttgacaaggatagtggggctatgtggaccaatcgtagtctaactctcaatggaatgacctacgaaattgatgatcaaggacgtgtgacatcgtcacttcgaaatacctttgttcaagataaggatggtgactggacctacctcaaggataaagggcaagtagctactggatggcagactattgacggtgtccaactctactttgatggcactggaaaacaaatcaaaggtgaacgtatccttatagatggaaaatactactatttcgataagaacagtggcgaacttctccgtaatgcattccattcctttaattcatatattcactactttggcaatgatggagcacaagtttttggctggtacacaataaacgattaccgtgtttactttaaggaagacggtctacaagctaaagataatgtccttttaattgacggaaattattattatttcaatcaagatggccaacttcttgttaatggttccgctaaatcatataatagtttatatcttgcagattcagaaggaaaattattaaccggttggagagagattgacggtaagacctattacctaaatccaagcaaacaatatcgctactctaacacaacagaaaccatagacggaaagacttatcttttcggttcttacggagaattgttacgaaatgacactaactacggacacgcttcggatgaaaatggaatcgttcgaacaggattctaccgtactgataaaggctacctctgctatcttgagccaagagtaatctcttactaccaaccaacttggaaggaaattgacggtaagctctatcacttcgaaaaatcaacttcattaggtaaagaccttaacggttctccaatcacaaccaatgcaacccttgaaaaagatggcaaaacttatgtcattgatgaaaatggtgtggcaactgagaaagtgaattaaagggtaaaagcctaaaacttttctttttcataatctcctaaatccagggctcaggtcctggatttttttgtgtaaacatctacttctctcaaacgtctctattgcactatttattgaaactataattatgtatgcgttttctattgagtttgttagaaaataagggtaagatataatcataaattaatctttggtattaatctcgttgattctttcacgatgtgagtatgccaagtcaccataataagggggaaatttatggaaaacaaagttcgtttcaagcttcataaagttaagaaacattggattacaatcgctgcttcaagtttggctatcggagcttcactaattggactaggacaggtcggagctgatgaagtcaaaccagaaacgactgctgttaacagtcctgaaaatgtcgtctctgacatcaatcttgagacaagtgctagccttataacaagaaccgaagtagctccaacaagcactactgttgagaaagcttctagtgaagcagtatcttctgacactacatctacgaatgtcgctactcagccaacagaaacaactgctacacagcctgctgacgagactgataaaaagcttaaacccgctcaatctggtgagacagctacaaccgatagaagtgttgaaaccacatctgaaaaaagcgataacgtaactccttcacaagaaacaccttcccaaggtggcaagttcacttctgatgaccaaggcaactggtattacctagacagcgaaggccacaaactaacaggcccacaaaccatcgacagctttaacctctacttccatgacaatggcatccaggcaaaaggtgaaaaggtgaccattgatggcaaagactactactacgacaaagataatgggcgtaaagtaactgatacaagcattgaggtagacggtaaaacctatttagcagatgctgatggcatccttaccgaaaaaacgcaactaccaacccaggttgtaactggtggtcatttccaatctgataaccaacaagactggtattactacactgccaatggtgaaaaattgacgggttggcaaaatgttgatggtgtcatcctttattttgataaagatggtaaacaagtcaaaggacaaaaacaagaaatcgacggcaagcactactattttgcctatcataatggtgccttaatgactaatcaatggtatgaacatatcatctttaatggttataggaccaatccaatgtatacgcacctctttgaatatctaggagaggacggtgctcccgttacaggttggcatacaatcgataacaaacgctactacttccaatcagacggcctgagagctcaaaacgatctcgtaaccattgatgggaagaaatatttgtttgattatgacggtcaattggttaagaacacgtatggcatcgttgaaagaccttctatgtttttctctagtaaaacaacttaccacactgatgctgacggcgtcattcaaaccggtagacatataattgatggtaaggaatacattatttctgaaaatggagttgtcctaaacggtattatcacttttgaaaataaagattattttgtcattaatagtgtagtccaaaaaaatagccttaaagcctactttgcacctgttgtctataacaatgaaggtatttttaatggaatctatggcactgatgaaaacggaattgtcttaaaaggattccaacgaggtattgatggtcaactccactactttcaaccagaagtaaaaagtgtcactaagccttcatgggaggaaatcaatgggcaacgttaccgattgacagatggagattacgtcgaacctactgctggtatgcgtcctacaattattgtctctaatacaactttgaaagttgatgacaaagtctattcctttgatgacaagggaatctcaactgaagttacacctaaaaatcagtttattcgcgacgacttttggaactggtactactacgacaaagatgggaaactcctaacaggtcgtcaaaccattgatggtgtccaactctactttgataaagatggcaagcaagccaaaggaactttggttgacatcgatggggatacctactacttcgataaagatagcggagctttatggactaaccgtaccattgagcttggtggtgttacctataacattgatgaagaaggacatgtcacatcatctctacgcaacacctttgttcaggacaaggatggcgattggacttatctcaaagataagggccaattagctactggctggcaaaccattaacggtgtccaactctactttgatggcagtggtaagcaaataaaaggtaagcgtatccttatagatgggaagtactactatttcgctgaaaacaatggtgaactcctccgtaatgcattctatccgtacaattactattctaagctctactttggcaatgatggagctcaagtttttggctggtatacactagataatcaccgtgtttactttaaggaaaatggtcttcaagctaaagaagagttgcttctaatcgacggaaattattattacttcactcgagatgggcaactcctagttgatggttcagctaaattatttggtgaaatatatcttgccgattcagaaggaaaactattaaccgggtggagagaaattgacggtaagacttattacctagatccaagcaaccaatatcgctatatcaataaaacagaaaccatagatggaaagacctatcttttcggttcttacgcagaattattacgtaatgaaactaaatccggttacatttcagacgaaaatggaatcgttcgaacaggattctaccgcactgataaaggctatctctgctatcttgagcctcagataatatcttcctaccaaccaacttggaaggaaattgacggtaagctctatcactttgaaaaatcaacctcattagggaaagatttgtacggttctccaatcacaaccaaagcaacactagaaaaagatggtaaaacatatatcatcgatgaaaatggtgtagcgactgagaaaatgaattaaagtgaagaacaagatatttcttccactttaagaaaactttaggctctgctctatatactataaccatcctaaaacttttctttttcataatctcctaaaatccagggcataggtcctggattattttgttttagaaaagtctgtagcaactaaaatcatcccctctcactcgcaacgcaatgtaatcgttttcttatttttgtctaaatttcttatattttcttgaaagtctctaaaatagcactataataggaagtaggaaaaaggaggaagaattatgaaagtacattctaattttactggacctaagtccaaaaaacgtctgattgcattctcatgtgcaactgctcttgcaagttttgcctttatcgcaagacctgccttcgctgaggaagctaaagttgacaactcatcaaaccttgatacgactgctgcaacatctaccaatgtggaaaccacagcagaccttgtcgaaactaaggttgttgaagctcctgctactactgaaaaggtagccagcactgaaagcactacaaatgtctcagaacaagtcacaacttctgctgcaagctctgaagttgtcagtgaaactgcctcaacaactgcaagtgaaagccaaactcctgcagaatcagccacaggccaaacgcgcgaagctgtaactacagaccgagctgccaatgagccagcttcagtacctaatgaaacaaacgtcactggtggtcagtactatagagacgaatatggctactggcattacaaagatgctagcggtaaagacctgactggaccacaaactattgatggcgttaaggtctactttagagatagtggtgttcaggttaaaggggaatttacctgggacggtcactattatgacaaagattctggtgctcttgttactaataaattcgttgagagttacggtagcacctattacctagatgaaaatggcaataaagtaatcggtcccaaagaaattaatggggaatggaattattttgacgactacggtgaacaagttaaaggtagatttgcttctgatgaccgttattacgacgaaaacggaaaacaagttgatttcgggacaaaccgctattttgaattaaacggaaaatggtactatgctggaaatgatggtgctattttaaagggaccacaaaccatcgatggcgttaaggtttacttcaatcaaggtggtgttcaagttaagggctattttgttagaaatgatactaacaataaagaacactattacgacaaagattctggtgcactagtcactaacaactacgttattgcctacgataactatacccaccaaaatgaacgctactatgttgatgagcagggtattcgtgtaaaaggtgctaaaactatcaatggtaaacaggtttactttacatatgatggaagacaagtcttcgacaattttggtgacgatggctacttctatgatcaggatggtaaccgagtcgacctaggcacaaaccgttatgttcaaattaaaggcaactggtactacatcggtaacgatggaaaaatcttgacaggtgaacaaactattgatggcgctcatgtctactttggctataaaggtatccaagtgaaaggagattttgactacaacaaacaatttcatgataaagactctggaaatctagttactaatcgtttcgtaacagttaaagacaaaacctactttattggagctgatagtaaggctatcaaaggggcaacagtcatcgacaacattgaatacttctttgataaagaaactggtgctcaagttaaaggaaatttcgcaagaaacgataaatactacgatggggtcactggtgctctcgtaaccaatagctatgtccaagttgataaagactggtactatgtaggcaatgacggtaaaagacttaaaggttctcaaaccattaacaatgttcctgtatactttgatccttatgggggtaaacaagtaaaaggagagtttggtgataatggttactattacgaccaaaattctggtgccaaagtagatttgggaacaagtcgctatgtccaagttaacgataattggtactacgtcaatgctgagggtaagattctcaaaggcgaacagaccatcgatggggttcaagtccattttgatactaaaacagggcaacaaattaaagggggctttactgacaaagatggtaaattagtcataaaagaaaaatattatctatctggtactcctatgagatattatgataaagactccggtgctcttgtaaaaaatcaatacttcaaccataatggtaaatggtactatgcagatgcagaaggtaatatccttaaaggctcacaaaccatcgatggggtacatgtttactttgactataatggtgtacaagctaaagatactgttcttgatggttactactacgataaagatactggcgcacggaaagagctccctcgtgatcagtttattaaaattggtgacgatttatactattttagcagtaatggacgaactggaagtataagtgttaacggtaaggattactatgttgagcaaaacggaagggtccttcgtggttcctttaacatatatcaaaatccaccttactatgatgatgaaactggcgaagctgtagaaaaaactggttttgttaaatctcgcggtagttggttctacctagaaaatggtaaaaaagtcgcaggtttcaaaaaaattgatgggaaactttactatttctctgccaatccaatgaacaaatacgaaacaaacgaacaagttcgtggaaaattagttggacctaagttttatatttcttttcttagcagagcagaagacaacccaacttactacttcgacgctgaaacaggtgctgctgtaaccaaccaattcgtctatgcagatggacactggtactacttcggtaacgatggaaaggctcttctatttgatcaagtcatcaatggtcaacacctctactttgattatcaaggtaagcaaattaaaggcaatttcgttacagactacaaggggactcgttactacgatgaaaactctggggagctcgtaaccaaccaaacacgtaccatcaatggtgtgacttatcactttgatgaaaatggacgtgcaaatcaattgtaaattaagtccgaaaatcgactaaaattattcttataagacatctatactaaggaagttgattaatttcaacttccttttaaaaatccaagaaaataatttttgtctactttaagaaaactttaggctttgctttatatactaaaaccatcctaaaacttttctttttcataatctcctaaatccagggcataggtcctggatttttttgtttttagaaaagtctgtagcaactaaaatcatcccctctctcactcgcatcacaatgtaatcgttttcttatttttgtctaaatttcttattttttcttgaaagtctctaaaatagcgctataataggacttaggaaatggaggaaaaagtatgaaagtacattctaattttactggacctaagtccaaaaaacgtctgattgcattctcatgtgcaactgctcttgcaagttttgcctttatcgcaaaacctgccttcgctgaggaagctaaggctgacaatgcatctaaccttgatacgactgctgctaccactgccaatgtagaaactaccgcagacctcgtcgaaacaaaggttgtcgaagcacctgttactactgaaaatgtggctagcacagaaaacaccacaaatgtctcagaacaagcctcaacttctacagcaagttctgaaactgccagtgaaacagcttcaacaactacaagcgaaagtcaagcacctgcagaatcggtctcaggccaaacacgcgaagctgtaactacagaccgggctgccagtgaggctgcatcagcaaccgcagataccaatagtgaaaccaatgttaccggtggtcaatattatagtgatagccttggtaactggtattataaggatgctagtggtaagaacctaactggtgcacaaaaaatcgatgggatcaacgtttatttcgatgaaaatggcatacaagtcaagggaaacttttcaaaaaataaacaatactatgatgcagattctggtgctcttgtaacggattgttatattaatcatcttggtggtgtttactatgtcgataaaaatggtgaaccattaaaaggcgcacaaaccattcaaggaaaacaagtttatttcaatgattacaacggccttcaagttcgagacggatttgctagcaatgaacacttctacgataaagatggtaaccttgtaacagatagctatgtttttagcactaaatacaactataacaacactatctatcctttctatgttgataaaaatggcgacaaattaaaaggtgaacaaatcatcaatggaaaatctgtctatttcgataagtatgatggagcacaggtgcgtaatagcgttgctgacaatgggcgtttctatgatcaagatggtaatttagttgatctagggaaaaaacactacgtgttcatcgataaccattggttctatgttgatgaagatggaaagatacttaaaggtgaacaagtcattgatggtgtgaaagtttactttaccccttattacggatatcaaattaaaggggattttaattctgacggccaattctatgacaaggatactggcgagctcgtgacaaaccgttatattcaattaacacgctacgaatcgaacggctctatggctccaactctagagacccattggtattatcttggggcagacggaaaagtggtaacaggtccacaagttattgacggcgttcgtgtctactttaactatagaggacaccaagcaaaaggagactttggctacgatggttattattatgataaagacactggagcactcgtcaaaaatagctttgtctccttagagcaaccatcaggaacccttatttattacctcgataacgaaggcaatacaattaagggagaacaaattattaatggtaagcatctcaacttcggtgaatacggtatccaagttaagggaaatttcgcacctaatggacttttttatgatgcaattacaggggaacctgttactaatcgttatgttcaaatcaatgaccagagtaactcatataatacccttgaaaataaagataaatggttctatatcggttcagactctaaagctcttaaaggagagcaagtcattaatggcgtaaccgtattctttgacaaagatggggttcaagctaaagggattttcgcagatgacggtttctattatgataaagattctggagcacgcgttaatcttggcaacaatcagtttgttcaagtgaacggtaactggtactatcttaataacgaaggtaaaattgtaaaaggtgaacaagtcattaatggcaacaatttttactttgataaagatggcaagcaagttaaagggaactttgctgaaaatggagcgtactatgatgaaaattcaggagtacaagtaaccaatcgttatgttaacttcaataacaattggtatagaatcggtgctaaaggtactcctcttaaaggtgcccatgtcgttgatggtcataatgttttctttgaccaagacggtaaacagattaagggcgacttcgcttcggatggctactattacagtaaaaattcaggagaccgagtagacttaggacaaaatcattatcaaaacataaacaataattggtattatattggtaatgacggcaaacgccttactggtgaacaagtcattgatggtgtcgaggtctacttcgatagtactggtaagcaggttaaaggaaactttgctgaaaacgattcattttacgataaagatagtggtgcccgccttaaggaacaatttgtcgatttgaatggaaagacttattatgttgatgctaaaggcaaaagacttagagaagggggagttcgaactatcaatggtaaagagtatacctttacgggcggtgcagatccccaccttgctagagaagaatttctatatccttacggctactcttcattctacgatttgaataacaaagaagtcaaagggcctcaattcgttaaggccaaaaacggtaatagatattacattaccgcttctggtcacgtcccattagggcttcacattatcaacggagaactttatatgtttgatgctccgacaaataaatatgctgatggtagggttagtgcgaatggcttgactaaagactatttcccatcacttattcctaatggtagccatatctattactttgataaggaaacagctactgctataaaaaatcaatataaagaggttaatggtaactggtattactttggacctaattggtatgcactaaccggtgaacaaactattgatggggctcatgtctatttccatagagatggcaaacaagctaaaggggaactagtcactgtaaatgataaacttcattattatgatcctaacagtggtgcacgtactgagaacactaccctcactatcgaaggtaagacctaccattttgatgctgagggaaatggaaaactcctcaattagtgtaagtgagcagtaagcattatgaaaaagtaattccatcttccactttaagaaaactttaggctttgctttatatactataaccatcctaaaacttttctttttcataatctcctaaatccagggcataggtcctggatttttttgtttttagaaaagtctgtagcaactaaaatcatcccctctctcactcgcatcacaatgtaatcgttttcttatttttgtctaaatttcttattttttcttgaaagtctctaaaatagcgctataataggacttaggaaatggaggaaaaagtatgaaagtacattctaattttactggacctaagtccaaaaaacgtctgattgcattctcatgtgcaactgctcttgcaagttttgcctttatcgcaagacctgccttcgctgaggaagctaaagctgataactcatcaaaccttgatgtgactgctgctaccactgccaatgtggaaaccacagcagacctcgtagaaacaaaggttgtcgaagctcctgctactactgaaaatgtggctagcacagaaaacaccacaaatgtctcagaacaagcctcaacttctacagcaagttctgaaactgccagtgaaacagcttcaacaactgcaagcgaaagtcaagcacctgcggaatcagccacaggccaaacacgtgatgctgtaactacagaccgagctgccaatgagacagcttcagtacctaatgaaacaaacgtcactggtggtcaatactatagtgatgaccaaggcaactggtattataaagatgccagtggtaaaaacctcgtaggcgaacagactatcgatggccaaaatgtttatttccgcagtaatgggcaacaagttaaggggcctttactcgataggaataataatctatttcgttactacgatgttgatactgggcaactatggacgaatcgataccttgaatcccaaggtaattggtactatttaggtaaagatggctatccactcactggagaacaaactatcaatggtcaagaagtctacttcgattataaaggtgttcaaatcaaaggtgactttagcggagaggactatagctatccagatcaaactttctattacgactctaactctggtgcaagggtccgaaaagaaggtctagttcagaataaaaaaggccaaaccttttacatcaagaacgatggttctaaatttacaggaatacgtgaaattgatggtaatatctactatttcaaagcacgtgaagctgcctctcctgttgataccggcgtcctacaaaaaggaatcagcattttactagaagaagggcaaaattcaccacgtacttatggttttggtacccctactaatattacccgtcgctactattttgactcagttactggtcaagccgttaaaaatcgctatgtccaagaaaatgatggctggtactattatggtgcagatggaaatgctattcgtcctcaagatggtgaagtcaatatagacggtcaaatcgtttacctatatgctaatggtcgtcaagctaagggagagcttgttctcgacaatggtgttcttcgctactatgatcctaattctggagcacgcgtctctaacaccactctaacaattaatggtatgacctatcgatttgatgaaaacggcgtaggtatggatgctcctaacccaaatggttattatagcgacgataatggaaactggtattataagaacgtaaatggagacaacctcactggtgctcaaatcattaacggtcaaaagttatttttccgcgacaatggtcaacaggttaaaggtgcttatggtgattcctacggtgatttatacgcattctacgatattaattctggaaatcttgtaaccaatcgttatgttgaatacatgggtaattggttctatgtaggtaaagacggtaagccagtcaagggagctcgaaatatcgatggacaagatgtcttcttcaactatcgaggggtacaagctaaaggaggatttggtcaagatggcgtctatatgcctgagtactattacgataaagataatggtcgcaaagtaaccaaagctgggtttgttaaagataacagaggcttaacttactatcttgacgagaaaggtaacaaagtccttggacttcatgaaatcaatggtgatttatattacttccgtcgaggaggtgcctataagtacacccaactgggtgacatgtggcaagacagtattaattacatcgatggtaaaatctactacttcggtcatgacggtagagcaattaaaaatcgtttctatcaatggggtaattactggtactacttctatgcggatggttcagcagctactggtgccgttcagattaatggacaacaactttacttcgataaaaatcatggtagacaagttaaaggcgcttttgcaccagatggtcactactacgatgaaaactctggtgaactcgtcactaaccaaacacgtactatcaaaggtgtaacttatcattttgatgaaaatggtaacgcgactaaagtttaagctattccttactttaagaaaactttaggctctgctctatatactataatcatcctaaaacttttctttttcataatctccttatccagggcacaggtcctggatttttttattttttaagttcctatgattgcaaaaattgtgacatttgccatttactcgctttcctatgtaatcgttttcttatttttgtctaaatttcttatattttcttgaaagtctctaaaatagcgctataataggacttaggaaatggaggaaaaagtatgaaagtacattctaattttactggacctaagtccaaaaaacgtctgattgcattctcatgtgcaactgctcttgcaggttttgccctcatcgcaaagcctgccttcgctgaggaagctaaagctgataactcatcaaaccttgatgtgaacgctactaccactgcaaatgtggaaactaccgcagacctcgtagaaactaaggttgtcgaagctcctgctactactgaaaatttaggcaccactcaaagcactacaaatgtctcagaacaagccacaacttctgctgcaagctctgaagttgtcagtgaaactgcctcaacaactgcaaacgaaagccaggctcctacagaatcagccgcaggtcaaacacgtgaggctgtaactacagaccgagctgccaatgagactgcaacagctaacgaaacttcaaacagtgaaacaaatgtcaccggtggtcagtactatagagacgaatacggctactggcgttacaaagatgctagcggtaaagacctaactggaccacaaactattgatggcgttaaggtctatttcaattcaggcggtgttcaggttaaagggggatttggctgggacggtcactattatgacaaagattctggtgctcttgttactaataaattcgttgaagaatatggtagaacctattacgttgatgaaaatggtaataaggcaattggttccaaagaaattaatggagcatggaattattttgataaacacggggaactaattacaaataattttgctcctgatggccgttattatgacaaatatggtaagcaagtggatttcggaagaaaccgctatttcgaattaaacggggaatggtactatgctggaaatgatggtgctattttaaagggaccacaaaccatcgatggcgttaaggtctacttccatcagaatggtattcaggctaaaggctattttgttaaagatgaggaagataataaatctcgatactacgataaggatactggtgctcttgccaccaatcaatatgttatcgcttacaatccttacaaacatcgaattgagcgttattatgttaacgaccaaggaattcggttaactggtcctcaaacaattgacggtaaacaagtctacttcgatacctacgagggaagccaggttttcgacaattttgctgacgatggctacttttacgatcaagacggtaatcgtgtcaaccttggtatcaatcgttatgttcaggtcaaaggcaactggtactatgtcggtgaagatggaaaaatcttgagaggtgagcaaactattgacggcgctcacgtttattttgaatatggtggcaaacaggttaaaggagattttgactataaaaatcaatttcacgataaagactctggaaatttagttactaatcgtttcgttaccgttaatgacaagacctacttcattggagccgatagcaaagctatcaaaggagcaacagtcattgacaacactgaatacttctttgacgagaaaaccggagcccaagtcaaaggaaatttcgctactaacgataaatattatgatggaatcactggtgctctcgtaatcaatagttatgtccaagtcgacaaagactggtattatgtagacaatgacggtaaacgacttaaaggatctcaaaccattaacaatgttcctgtatactttgacccttatgatggtaaacaagccaaaggtgtctttggtaacgatggctacttctacgacaaagattctggtgctaaagtagaccttggtaccaatcgctacgtttacatcaacgataactggtactatcttaatggagaaggcaaaatccttaaaggctcacaaaccatcgacggggtacaggttcactttgatccatattatggtaatcaaattaaaggagaatttaccgatagtagtgggtatgtggttaaagcaaactcctacactagcccagttaaattctacgataaagattccggcgctcttgtaaaaaatcaatacttcaacaataatggtaaatggtactatgcagatgcagaaggtaatatccttaaaggctcacaaaccattgatggggtacacgtttactttgactcttatggagttcaagctaaagatactgttcttgatggttactactacgataaagatagtggcgcaaggaaagaactccctcgtgatcagtttattaagattggtgacgatttatactaccttagcagtaatggacgaactggggaaataaatattgatgggaaggattactatattgctcaatatggtagagttcttcgtggttcctttaacgtataccaacagccaccttactatgatgacgaaactggcgaagctgtgaaaaaaactggttttgttaaatcttatggccgttggtactatttagaggaaaacggaaaaaaagcaaaaggttttaaagaaatcgatgggaaattatattacttctccaacaatccaatgaacaaatacgaaacaaacgaacaagttcgtggacaattagttagacctaaattttacatttccttcccaaatagagcagaagacaacccaacttactacttcgatgctgagactggagctgctgtaaccaaccaattcgtctatacagacggacactggtactactttggtaacgatggaaaggctcttctctttgatcaagtcatcaatggtcaacacctctactttgattatgaaggtaaacaagtgaaaggtgatttcgttacagactacaagggaactcgttattatgacgaaaactctggtgagctcgtaaccaaccaaacacgtaccatcaatggtgtgacttatcactttgatgaaaatggacgtgtgaagcaattataaggattttagtaaaatagactaagtttttctcacagatatctatactagaggaagttgattaatttcaacttcctttttaaaatccacgaaaattaattttgtccactttaagaaaactttaggctttgctttatatactataagcatcctaaaacttttctttttcataatctcctaaatccagggcgcaggtcctggatttttttgttttttgataattgtttgacttactaagaactggaaaaatctcacctaatagccagaaaaatagatgttattctcttttatcaatctcttcacattaaaagaaagcctttttatttttaatattgaaaaggctttcttattgcattataatataaattaaaaagggggaggtatttgttatggaaacaaataataaggtcaaacatcaaacatctaaaaagtatcttattgcattttcatgtgcatcagctcttgcaagttttgcgcttattgcaggagctgcttttgcggatgaagtaactactggtgaaacacacaagattgacacaacaacaagtgttattgccaatgttgaaacaacagcagacttagttgaaacaaagggtattgaagcagcatcttcttctgaaagttcaacaggtgctccagagttagcaagttcggaaaacgttagagaaacggcttcagcaacaactagtgaaagtcaagcacctactgaaacagccaccattgaagcacaagccgtttcaacaagagacagtgccactagtgaaacagctacgacaactcctgttatcaatgaggacgtaaacgttacaggtggtcaatattacagtgaccaaagcggtaaatggcattacagagatgccaatggtaatgacctgactggaccacaaactattgatggggttcaagtctatttcgataaagaaaatggcgtgcaagctaaaggcgtttttgcaaaggatcctaataatgctaaaaaactaaatttctatgacaaagattctggtgcccttctcaaaagtcaatttatcgtaacctacagcaacgatacgaaacaatatgaacgttactatctagatgataatgggaaccccgtgtacggtgagtatcgaattaatcgtagatcagtatactttgatgataaatccggtactcaaatcattgaccgctttgctcctaatggacacttttacgatcaggatggtgttttcgttaatttaggaaccaatcgttttgttgaaatcaaaggaaaatggtattatctcaataatagcggacaaatcataaagggtagccatatcatcaatggggctcaggtctatttcgatgaaaatggtattcaaataaaaggtgatttcgataaggaaaaccgctattatgatgaacacactggtaagctagtaactaaccgtttcgtaacagttaaagacaaaaactactttatcggcgcaaaaggtatccccgtgaaaggtgctactcttattgatggtaaagagtactatttcgataataagaccggtgctcaagtgaaaggtgactttggaggtaatggtaaatactacgatacttcaactggtgcactcgtgaccaaccgttatgtcaatgtagataaatattggtactatgtggatgctgagggcaaaccactaaaaggttcacaaaccataaataatgttcctgtctactttgattcttattatggtcgacaagtgaaaggtgattttggagacgatggttactactatgataaagactctggtgtgagaatcacactcgaaaaaaatcgttaccataatattaataaccattggtattatgttggttcaaatggcaaaatccttaaaggggatcacgtcatcaatggtgttcaggtacatttcgacaaggtatttggaatacaagctaaagatgactttgtagatgaagatggtattaatgttttctatgataactttgttgtcttcggtaccccagttaagtattacgacaaggatactggtgaacttgttaagggtcgttactttacaactcgaggtaagtggttctatgcagataagcaaggtaatattctaaaaggtgctcataccattgatggtgtccctgtctactttgacgaccacctcggaacacaattcaaaaacgtggttaaaaacggccactactatgataaggataccggtgaacagaaggaagtcccacggaaccaatttgttcatgttgataatggtctcttctattatgataaagatggaaaaccactttctgattctcaaaccattaatggtgtaacctattcgttctatgaagatggacaagcccgtcgaggaacttttggaccttacggttctggacctttctatgataaagttactggggctgcagttagagaaaaaggcttccatcaagtaggccctcaatggtactatactgatgaaaatggtaacaaacttttaggtcttcaaaaaatagatggtaaactctattaccttgataatacctggtcagttagctcagttactggttttctcgcaaaagatgaagtgcttagtcctgagcaaaaagaatcatctagatatcctcatacatctagcagtactattatcaaacctaaactctatagttactactacttcgatgctgagactggagctgctgtaaccaatcaattcgttaattggaaaggcaactggtactacttcggtaacgatggtaaggctctcctcttcgatcaagtcgtcaatggtcaacacctctactttgattatgaaggtaaacaagtgaagggtgatttcgttacagactacaagggaactcgttattatgacgaaaactctggtgagcttgtaaccaaccaaacacgtaccatcaatggtgtgacttatcactttgatgaaaatggacgtgcgaagcaattgtaaaataagtgtgaaaatcgactaaaattattctcattcgtcatacagataaacgacaaacaaaaagtccaaatcaaactattgatttgggctttttggtaggtaaagaattattggtccttttttaatctttttaaatgtttatatagacccagagcacgatccagttgcatagattcgataggacgtttgcccttgatatagagatttccattggtcgcattcatcaaccctgttttagcaatggcatagccagtaatcatgccactataaaggaatttttccagttcattgacatctaaaactctgcttgaaggttcaagaataccaaattctgcctcataaatctcgacaagtcttttaaacttataggctgtttttatgggcatatctccgacatttcccttggcataataatgatagagattctgtgggcttaagtctgcagatgccacctcttgaccattgggcgagtaaggttgtgatttaatgaaagtattaagcttgccaatatcaatgtgggagtcgctaacattttccttaggaacagggaagtcattcctatcaacaatctcccttcgtcttatagttgccaacaattcataaggctcaactctaagtctttttgaaaatttttccaaagtatcaagcgaaaccgttcctttttgattgatcaggttatagttggtttgagccataccagatgagactacaaatgctgtcatacgttctctgacttctccctcatccatatcttccgtgatttccagcttcttgcgaatattgtgccacaagttttgggtgacttgatcaggatctcttggaaactcaaaaacttcatactgattgtctcgagccaagagctttccaagtgtaatgtttttcccagtcaccttggccagaccgttagtaatggttacaatctttgggatatttcccttaggcttgttcataaaaagcatccgaaggcttcctgatggaatccccgtggcttctgagagctctctgtaactctttttgtctttccaaaattcccccatacgagctttttctgcattttcccagaaaagctccttaaggggtttgggggcattcggctcatccgaaaatagtcgttttgacatcattgtctccctctaaaattgctgttttaaaattagtccaaatctattatctcatatttttaataaaaatcaaatcttttcctaatcaataatcattacaatcagctagtcgtttagagtttttcttgggttaattgagcacaaaaattcccctcgtacttaaacgaagggagttgtttgcctaataattccagtttaccaagagatagataaggcttgagccaaacatatctgctaaggcatgaacgaggaaaaatggaagcaagtttttaaccttatatttataaaggaaataatagaggagaccaaagacaaccccgataaccagagcccatagcatgccctgataggtatggaaggacacacgaacaatagttgaaaagagcaagaccaaccacttatacttgtccttaaccgaggtcaagagtcctaggaagaaaaattcctcgtagaaaccgttgagcaagccataagcaattgccataggtgacaaagccataaacttatcaatcacagccatagggctaataaaggctagaacttgaggactaaaataattatattgtcctgacaaagtacttaccatatcagcaaataagcccatgatagcgaaaataaagggtacccaaaagagaacagaccactttagacggattggcagttgtttaaagtcaaaatgacgtatccagagataaataatcgctaaggctaggaggataatctgcaaggtgaaattgctagagtaagctgctccttcactggctgtatttgttgatgtctcactgattgcggtagaaaggcttggagacaaactggccaaatacatttgtgtcgaacgaacaataaactgaccaaacataatcagcgtaacaataccgatatcaaaccatctcagttccttgagcggctggtcaggatgaattttcttaagtaaagacatgggccttcccttccttctagcatcttcatcgaagactcgtttattatttaaggttattataagtcataatccttaaagtaacactaaaatttgcagtaagattagtatttcatttaaggaaagaaaaagcaagggaaagcatgtttcctttgcttcaaacaccttattaatcattctttttgacaacgctaactaagacaaggagttggaaaatggctagagcaaataagaccataaagccatttcgactaccttgagccgttgcttgtgcaaagtcaatcttgtgattagcttgactcatagcaacaattagagaggctagggttgttcccactgctcctgcaaattgttggagcgtgttaaagatagcattggcatcagcacgttgatctagcgacagttgtttctgtccattggtcataacattaccaaaggaaacgccaagccccgtcatgaaaatcatataaaagacgaggatcaacgtattggaaagagagagaccaaacaagctaaataacaactgagcgagtacgatcaggattgctccaatcagaatcggtttacgagcacccatcttatcaagaataatacctgagaacggagcgaatcctgcaccaataatagcacctggaagcaacattaaagctgctgaagttgtattcgagtggttaaccaattgcacatagtttggcaagaggaaactcatcgcaagggatcccaattggaaagagaagaaagcgatgatatgacctgtcagtttacgatttttcaaaatggagaggttgataataggcttgtccaatgttgttgaacgccaaatcaaaaggacaagacctaagataccaatcaaaagccaaccaagtactgagaaactgaagaaggcatgatcagcaaccccatgaaggcctaaaatcaagcccaagaaaagaaagatggtagccagtagactgaggatatctaaagattcacgttgcacctcactcttttgctcaattgaacgaatccctgcaatcagtgaagccaagagaataggaaactggacgaggaagatagaacgccaaccaaagtgtgctgtcaagagaccaccaacagtggggccaatggctggagcaacggctgtgattagtgtcccaactcccatcatgaggccaatcttacgacttggcacctgctccaaaatgatgttaaacatgagaggtagggcaaaaccaacacccatcccttgaaccaatcgtcccaaaacaacaaaaccgaaactaggcgctataaagtcgatgaggacacctaaaatagacaagaggttggcgaccagaaagatggttttcatcttaaacgagcgcttgagataggcagataagggaaccacgcaagcgaccactaggaggtagatagttgtaacccattgtacggttgacgtattgactgaaaatgccttcatcaatacgggaaaggtgatgttcatagctgtttcaccagctactccacaaaatgaaaggattcctgtcgcaaagatggcacacaggaccttggtggagattttttcgtctgacataagtatttgttcctcctaaataaacttaaatattacggtagtgttgtaaaatcttgagaaagacttctctctctttagctgaaaattgctgggcaaactcttcttcctcttttcgaagataagattgacaggcagaagcgatactgagagctttatccgtgagaacaaccgccttttgccttgcatcttttgaagatgtgtggcgttcaatcagccctttcttctccattcgctgtaagagcactgtcgttgtcgaacgctgaatctcaaattcgtgctcaatgtcccgttgaaagacttcttgatccgcatgattggttataaaatcaatgacagccatctgatttccagtcaaatcatactgcctagcaaaccggtcaaaatgacgcatcatattgttattggcttgttttaacaagcgcccaaaatggtccaaaataatgactccttaactaaattgttagctaactagcagtatagaagaattattagctcaagtcaatagattctttcaaaaaatagaaaactcaaggacctagaatccttgagttgctatatttagtctttctttacaggaatttccttaatcacacgcgccggattcccacctagaaccacattgtcaccgaaggacttggtcacaacggctcctgctccagccactacattatctcctaaagtcacgcccggaagaatggtcacgcctccaccagcccagaaattatcaccgatcgtaattggagcaccatattcaatgcctgaattacgctcggttggatcaagcggatgcaagggcgtcaaaaactgacaattagggccaatcatagcattgtcaccaatcgtgataggacagatatccaacatggtcaaattccagttggaataaaaattttcaccgatatggatattaacaccgtaatccgtaacgaactgaggattcattgcaatattttcaccagtcgaaccaaaccaagatttaacaatctctgccctcttgaggcgatcaggttcagcattaaaggcccattgtttttctctagatttggctgctagggcgcgtaactcaggatcgctaggtttataaaagtcacctgcaatcattttttcatattcagttggcatagcatactcctttttgcttcttctcctatattgtagtatagaagtgatgttaccacaagtgagactcccatacaaaagtatgtaaagtctttattctacttaattatatatcgatggtctcaccaacagctaaaaccctataacctgctgattcaacttcttttttagttgtcttgtaatgactataatcatcaatatgaatgggataaatccttttaggttgaaggagattattcattcggtttaacatttttaagtccatggtaaatgggccaccaaatgaacctgattttacagcacctaaattagcaaaaatagcatctatatttttagtgacattttgggttaagtctgggtacaaaacagtatcaccggtaaaataaataactttagtttctgacgaactggtgattgttagttgatagccatttaccttaccaactatctttcgcatgatgtaattactggcatgataagccggtaaggctttaatggtaatacagtagtcagcgacttgaaatgcttgttcttctccccatcttaaaacactattatttaaacatggcaccccatctaaaattttcctattaggagaaatgaccgtcttctctttcagataatctttccctacatcatccaaatgatcttgatgcccatgagtaattagccatacatcaactttgctaagaagagactcagccttataaacatcagtttgtttctcggagacaaatcctttaaactgaactgatgttcctttaggagacaagtcaggatcaattccaatatgaaattgattatcaatggaaatgacgccacatgcaacgccacaataagtaaacgaaatagacatagtacctctttttataacgaccatgaattgaaaaaccagtcattaacaataatggaatgagcatttaagtgcatagctcttgtaactagattatagtttttatcatcacttttatcaacaccagcgtatgttcgacaccttcttttacgtttaaaatacttagtttccacagacctcggttaggtaatccacaaaaaaatctcaagtgcacaaggcaacttgagattttctttctgtctgggcatgcctgagtcattcagggctttatattatttgtccttttgatctttgtgatcttttttatttttctttttacgtccgttgcggccaagtcctagacctgttaccgatacggtgaagccagcgatattgatggtttcttcaatcttacctttacttgcttcttcctcatttgagagattaattggcatcttgtgtttagagcctttaccctcagcttgacttgaaacaggagcttcaaagtcatcgcctggtccataagtgactggtccatcatgagcttccacttgctcttcgacttggtcgagaacttctaggtcttcaatctcttcaacaacaatatcgtctgccttgtcttccttaggtttaccgttaatatcgcctgtaagcgggatataaaccacggtttcttcaaggttacgttgacctactgtcttaccttcaaccttgtccttatcagcactgtagccttctacttcaggagtgatgactgtttcaaactgacctttatttgaagtccagtagcttgaaccaagctcttcacctgtaaccttatcaatagtcaagctacgtgtccattgagcagtttggatgttattggcaggaagttctgcttgtccatcgctagatgtgtagagaactgtgaaggttacgtctttgatgtagctttcgcgttctggccatttggcaccatcaggatttgctgggttgattggtgtaccagcttcttggatgttatctggacctacttgaacggtaccatgacgaagggtaaccatgaagttttggtcaacatgagaatcgccatcaaagataacgccgtttgtgaagccatcagcaagaagagtataaccacggtcgctatagtacttgatacgttcgattgttgagtattcaatcacttcacctgatttaccaagcaagtcgaccacttcaagtttcttacgagttgtaccgtcaacataagtgactgtagctttctgagcatccttgaggtaagtaaccacttccatgatttcaggagtttccacagaaacatctgtcatttcagcgacttctatacggtctggtgtgaatccgacaacctctggtgaaggaacagctgagaagccagcttgagtacttgaccatgcttcataattgatagcacctgtcacaaggttaacattagccaaacgtttgaaatcaagaacttcaacgtagtcgtcgctagccaaaccaccttcttcgaagacatactggatggtacgtgtcacatcggcacggttttcaagcatctctacgctatttggccaaactgggctattcacatcatttggatctacgacttcacctgcaactggtgctggcatatctgggtcgataagaaccaaacgttcacgaagaaccacttcgaagacttggtcaaagtcagagtcaccattgtaagtgtggtcaaaggcttctgcataaccatcgttgacaagttcataaccttgtttgagcaagtttgcgatttgttcatcagtagagtagtcaatcttctcacctgagcttccgacaacaacatcacgagtcaattctgacttatcaagctcattcatgtaaaggataatagctttttgctcatccttagcataaaccacgttggtatcttgacctgggtgttctggagtaataaaggccttttcagaaatgtaaccaagaacatctggaacgactgtttccatagccatggttggatcttctggatcattgttatagcttggagtaggtgcattttcaataggtgtaccatactcatctactggaataatcttaccaagttctgtgtaagtaactgtatcttccacttctggaaggtctggtcgaacttcaagtccaccagcttgacgtttatctgcatagaagccttcaactacaggaacttctacaacatcataagtgaagctgtcttgatcccaagtgcttgtttgttccacttggttaaacttaccgtggaagctgaagctatcttgaatgttgataactggatctttgtagccagcaccttggaaggtaaccgtttgtttcgtatcttgtgtgatatcatccaagattggttcgtaaaccaaggtttggtccatgctgaggtcaattggcaataccaattcactttcagcctggtagccggcaacttgtggtgctggtgtttcaataacctgcgtagcatcttgaggatcattagcataatgaactggttctgcttccgcgattggattaccaaagctatcaacagggataatcttaccaagctctttataggcaacactatctgttgcttctggtttatcaggtgtaacaacctgcataccagcaactgccttgtccgcatagtaaccttcgataactgggacattaaccttagcaaaggtatagctgtcttgatcccaagtgtaagtgtcttctgcttggttatattgaccagtgaaggtgaagtcagactggatattaacagacggtgttgcttcgccagctcctttgaagaagaccgtttgcaaggttggttgcgttacatcttcaaggattggagcgtactcaacaagaatatcgtctgtcaagctctcaggcatgacactttgttgcattggacggtaacccggaatgtgaggaacaagtgtctcactaaccttagttgggttattggcatcgttgttgaaggttggcgttggaacgtttggaatcaagcgtccattcgcatcaataggaataatcttaccaagtggaacgtaggtaatggtttcttcgatgttatcttcagtaacctctctaccttttacttctactctatccgcaaaataacctaaaacaactggtgcatagatgtcataatacttggtcttgtttggtgaccactctgtctcatcaacaagctcacctgtgaccttgtcaaaggtaagggtacggacccaataagccttttgcacatcggcatccggtaaatccgcattgccgtctgtactcttgtaaaagactgtgaagcttacttctttctcgtaagcatacttagatggccacttaggtccatctggattattaggattgattggagtatctgggacttgttcatagtcaggccctaccttggcaacatcgtgttgcaagaggacaaaccactcttgatcatcaatatccttgtcatcaaaaatggcatctttagggaattcgtcctgaatcaagtcatatcccatgtccttgaaagtcttgatacgtgttgctgttccgtattcaatcgcttcacccaattcaccggtcaactggtcactaaccaagtaagcaccggtagtttcatcaatataagtgatgctggctttcttgaaaattttacgatacacaaccggagtatcccctcctggtttgttcggtactacacttttaatatctgtcatataatcttgaacagctggtgttgctgtctcacccgcctttcgtggatcttttttgttattgttatattgcttagtcaaagcacctggaatatattccccatcttctgtcacagggataatgcgtcccaatttcctataggtcacatgttccgttaccgttggcacatagggcgtgacaacgttaaaacccgcttccttttggtcagcgaaatagccctggacaactggtaccgatatcttaggataggtataactgtccttgtcccattcgattaaaccagtcttcccatctctagtccctgtaaagacatggttttccatgacttcaggatctggagtttgcgaatccgctccttgaaagataatctcctgcttggatggaatcctcacagtttccgattgagcatggttatcaaagagggcttcgtcagctctggcaaaatctaatggggagggggcactgtggtcagagcgactttttgggttagtcaataatttagaaagatctatagtatcaactaaatcagagtgcgctgatttatgtgcaatatgctcttcggcagttcttgctgctgcttcagtcgcatcttccctataggctctcaaaaatactccccctttcttctttttatgagaaataaaatcctttacttgctaagttctcatggaaatcttttctattaagatttcattttccctcagagaagctaacaagttcttatcaaagattaaaatttttgatatctcttatatatactataatacgagaatcgaatttttacaagtaaggtgtaagaactttaatcattttaacccctaagtgaaaaaatagcgctttaatgtgcaatatctatcaagtagtttacgaaagtgacatcaaaatgagattacccctataacttaaatgatgagtctttaatggtgttttctctccctaaagacactctcataagaaatacactataaactatcacaactacttctcatctttgaatggctagagccttactgtatttgttaaagaaatggcctattaggaatgacacaggccaagcctgcgactagtcctcgactagggatgccaataaataactggtattactcctagtatagattgactttgacgcttcgtcaatagattggaaccatttaatgaaaatccccagtttctcaagtttctcgtattaagttataaataactaatagcttttttagcatgattactttttcatggaactacagatgtaatgattactatcagactatcatgactaactcaagatggttttaaaatcacttgttcagccatcattaaatccttaacgaaatccgaacatgccataaaaaccgagactactgtctcggttcatacagtttggaaacgattagatttgtcctcggccttgagcgtcaaagtaaacccaccatcctggactcacttcaacccaacggttaacagccatctcacctgaatttggatcatagtaacgaacaacgccgttcacacgaaccaaatgacctttgatttgtttaccattgttatcaaagaggaggttttgaccattgatattaaccatacctttgacagcattaccattaccatcgaagtaataccagctaccatcaatttcgtggaattgattacggtaaagctcacctgaatttacatcatagtaacgaaggttgccatcaacattagccaaagcacctttaacctgacgaccattttgatcaaagtagaggttttgaccattgatattttgtgaaccttttacggctgctccatcattattgaagtaagcccaaacacctggttcaatttcagcaaaacggttgcgagccatttcacctgagtttgcatcatagtaacggattgttccattctcgttaacagtacgccctttaacctggacaccattgttatcgaagaagagttcttgaccattgatgttttggtgacctgtcacacgtttaccattaccatcgtagtatgcccaaacgttattaccaatttgtacgaattggttgcggcctgatgtattgttattgttgttatctggttttggatcttgtttaccatttgcattcaagacaccgttttggtcgtagtagaatacttgacctctgcggttttgacgataaccatcacgcaattgcacaccattagcgaggaagaagtattgtttaccatcgatagtcttttcaccgattgccatgcggcctgagttatcaaagtagtaaacatttccgtcgttatcttttatgaaggcattcttagcacgtttgccatcgttataacgatagtaaacactgccccagctcttctcaaacttaccactaccatcaccgttttggttatcgttgttagttgattggttgcttccgactacttttggaaggctaaccttaccaccatttgtaccgtagtaaccgttgagaccattcttaagcacgtactctgaaccacggtcaagaatgttagtaccattcatgtacttcgcagaccacttcgtaatcttctcgtcagtagtcatacgtttaccagtagagatttgaacacgatcaaagatttgtgggtaaagacgtttcaattcatcaaggaaggcaccaccatatttaccttggtagtcgttaccaaaggtacgtgtcttagcagcgtagaggctatgattaatgattgctccatctttagtttcaccatagttattaacacgagttgcagtaaccacttcatcacctggaaggttgtagatttggtctggaacccagtcagcaatcgctgagatacctacagcgtggagtgatttaagagctgctttcaagtcagccaatgaaccgtacttgttgtccttgctcataccaatatcataacggtctgtaaaggcataaccattttggatgactgagtcaaggaagctaccgtcatcacttgaaacgtattgtggtgcaaattcaaatgatgtgataccccatgatttgaagaggtttgcattttcagcaatcttcttattagtgtattgtgatggattttggacgaagtcttggaagttagagaaaccttcgtagataacttgtgaatcaagggcagcatttgattcgtaaaccaaaccactgctgttcttttctttacttggtgctacacgcacgtcttgattttcagaagcacctactggtacccaaacggcaaggtaaccatcaacttgagggttacggataccacggatttcgtttgcattaaatgtcaaattaccattaccatcagtgtatttgacaatgccgttagcatcgctatcattcaagtaagtagccacaccatcgtttgttgtcaaaagcaatggacgataagcttggttacggtgagccgcacccatgttaattgtcaagttgcttgtcaaacgaagggctggttggtttgaaacgataactgccataccttggttgcgtgtttctgctgtaccagcatcagaagcactgttagcccctgtaccataacgtacagatgtcaagacacctgcagcatcccaaccattagtattaccataaccgatgtagttaaccttcatatcttgaccaccggctgcatagcggatacgacctttcaagagggtttcaatagcatcataatatggtgattttttagccatatattgaccatcatctgtgtacatgtctccatagtaaacacgtggcacagtgtccttatgcgtaagcatcaaggcatatgctgatgggatgttatattgtgtgtattgcttgttagcactacgcatgtctctgttgtagatttcaaaggctttcttcatttcatcaagagtgaaggtattccctgttgattgagggttgatttcatttttgatgatttgaccaatgattgattgtacctctgaatcgtgggcacgaacaaatgagtagttagccatacgtttagagtttttaccactttcagaacggtcatttaaactatttgaaatgagtggttcaactcctgaacggttaccaattggacgcaagagtgaatataccaatgccaagtgcatagggtcatccattggcaattgagcacctttggtgtcttcattgtagtaggcatcgttgtgagaccatgcttccaagatagacaagtgcttaatagcttgttcttggctttgatcagaaccatacttagctttgaagtaatctgaagcaatttggagaaggtcagcattgacattatccacggcatcgacacgaacaccatcaaagttttcatcttcagaaccaccagtgatagtaccgatgttcatgatgtagtggagccagttcaactgctcagcctgaaccgctggatttgagttgtcaatatcatttgccaacaagaattcaaaaccaccgttacttgtatccttagtatacttaggattgcgtttacctgtttggctagttggtgtgcggttcaagagacgatagtcagagttagcatggcttgtacgactatcgttgttatagagaagggcaccaccttgcaagtggtcactattatcaagattttcagaagttgaattccaacctggttgggtcttcacgaaatttttgatagttgtacgcaaccagtcagtgttaccttcacgcgcaatacgttcttcaatacgcttttgaacttcaagcgctgcttggtccatctgagtttgtgagctgaatgacgtataggtctgattggtaccgagaccttgctccttcatgtagttgaggtagctcgcttggatagccttgcttggccaccaaactgtaagcaatggacgtttgtcattttcagttgaagcagtccactctttaccatctttcaagatttcttttggacggtaccatgtgttggcagtgaagtaaccatcaacaagttcgatatctttatcagttgtaccataaaaggcattcttgtcaccatttacagtaacgtttgtgtttgtgctatcagctgatgaacctgttccaccgttcttgtcgaaacggtattctttttgattagacaattcaccagtttcagcgttgaagtattggcttccgccgttacgttcaaggacatagttcttacgaatagtgccgtcatcttcaacgtagtattgttttccatcaattgttttgatgtgacttggaccatcagttacgacattgttagttgctggaaggtcgttgtttactactgtgacagtattgttggcattgttagtattgccgttaactggggtagcacgacggcctcctgtaggaccacgtcgagcaccagtcgcacgacgttcacgtgtcgctgcgcgatcagtaactgttgttgtgtcagttgtagtgttgttatttgttgtatcaacagctgtatcattggttgctgttgtatctgttgtagttgccgcacgatcagtaccgactgtcgctgccgtatcaacagcattcgctgcaactgtatttgttgtatcagttgtcaaatcgaaagttgctgttggagcggcttgatcagttgcgacatcgtttgtcgctgcaactgctgtagttggatcctgagcagccgttgtatcgttagatacagtacccgtatcaacagtaatatcggggatggctacagtagcatccgtgtgttcgtcggcctgaacgacaccgtcgttagttcctaaagaaaccgctgagactgcaccgagtgacatccctgtaactgcgatggttacccattgtttcttaactttgtgcattttataatgtacttttttgtccataataaaaagactcctttttcccatttatagcttcattctaaatcattgaaagctttttttcaataagattcgataaattttcataatttttagaaaagtccttttattgctttaataacattagttttaaatgagtgtttagaattataaacatgctcattttagttcgttgagaaacagataactgacactctatggctatttagaatgattattgataagacctccttttaatgggattacaaggaaatctaatgaaaattcacaaaatccttaaagcacttctctcaaagcgaccaaaaatactatccttaccaaaccattaggtctgttaggatagtattttttttagactatcttctcatacaaaaactaaattctaactatctaagctattcattacttactgaggtgtcagaggggcaagtttggttactctagtgctaattaaaaatactcttttccatcaaaaacgaagggaacagaaactagattgtagagcgacaaatcatcataacaaatagttcaaatgcctatctaccctgctgaaaacaagaaaaaaggagtataataaaggtgaaaagagttaaactatttagaaacaaatagaggggtaggtgagaaagatgtcagtacaacatacaaacttcaacacaagccaagataagggtcagactggtcaagaggtcaataatcaagagctcattaagaagaactctccagacaacaggcttgcttctattctccttgcagtcgccttttatttagctatcgtttatcttgccttatttttgctcttaggactgtcaaatccttggggaatagttataatgattttcctagcacctaatttgattagttttattattgcaactattttaacaagaataggacgtaaaaaaggtaataaaaactttctatacactagtgttattttttacctagtctcaatttttttggcctatgaccctgactggggagtttttcgagttgtaccgattctgttaactattctcgtaacagtgggaacagtcatgtataaacaagataatgagcaagacaacaaataagagaccatgttcaagtggtctcttatttttatgtagtcattagtatttcaaaaggtcagttccattttgaaactttcacaacatctccaaatcaaaaaaacacctcctagctagaattgttatctaacatgaaggtgttttttattgtgcttatctgagcattgtaaagacttctacaatcctgaaatacgaataatcttcgtcctattcttcatttttcttacgtttggcaagaaatccaagaccagttgcagttgccaaggcacctaaggccatacctaatgatgagttttcctcaccagtcttcggaagcgcttggctaccacgtttgtgcttaggatccctcacttcagaaattgattctgaagtagacactgaagcacttgttgatgcaaaggctgaaagacttgctgatgtactcaatgaagttgaggtgctagtgctttcagaaatactcaagaatactgatgtagaagcgaactctgagactgaagcggaggcgctcgctgaggctgacgcagatgcacttgcactttgcgattcgctcaacgatacagactcacttgtagaaatcgaagcacttacagaggatgaaacagactgtgattctgagactgactcacttactgaagttgattctgagtttaaaacggattctgattcagacacagacgcactctctgaaacggactcggagttcgatactgaatgcgactctgaaattgagacacttactgaagttgaaactgaggcagatgtacttgctgacgctgatgtagacaatgactcagatatacttgttgaggctgaaagacttgctaaggtactcaatgatgttgaaatacttgttgaagcacttgtgcttccagaggcactcaagaatactgatatagatgctgactcggatactgaaacgcttgatgaagcagtttctgaggcagatgcacttgctgaggctgacgcagaggctgacgctgaagcggatgcagacaatgactcagatacacttgttgaggctgaaagacttgccgatgtactcaatgaagttgagatacttgttgaagtgcttgtgctttcagaggcactcaagaatgccgatgtagaagcggactctgaggctgacgcagatgcacttgcactttgcgattcgctcaacgatacagactcacttgtagaaatcgaagcacttactgaagttgatactgatgcagacgctgaagcggatgtgctggctgaggctgatgcagatactgaagctgatgtgcttgtgctttcagaggcactcaagaatactgatatagatgctgactcggatactgaaacgcttgttgaagcagtttctgaggcagatgcacttgctgatgctgacgcagagactgagtttgatccagactgtgattctgagactgaggcacttgatgatgctgactcggaattagagactaattgtgattcactgattgaagcacttactgatgcactttcagaattagaaactgattgtgacactgaaactgaagcgctcaatgacaccgactctgatgcgctgactgattctgacactgaggctgacgcagagactgatgcggatgtgcttgctgattccgacacagattcagaaactgatgtgctaacggattctgatacagacgcacttgttgatgcagactcggaattagagactgattgtgattctgagattgaagcacttactgacgctttctcggagtttgagacagactgtgattcagacaccgatgcactctctgaggctgactcggaattagagactgattgggattctgagattgaagcacttactgacgctgactcggagtttgagacagactgtgattcagacaccgatgcaatctctgacgctgactcggaattagaaactgattgtgatcctgaaacagatgtactcaatgacgccgactcactcaatgatgctgagttagatgtcgaaagcgactcactagctgaaatgaagcttgaagctgagttcgaaatagattcaacagttgaaataatcgcagaaattgaagcactaaaggcttgagactggctttcaaatgcagaagcactcaatgagcttgacgtactcaatgattctgactctgaagtcgagattgaggaacttgtgctctgtgattcactcaatgatgcagactcactaactgaaatggattcacttactgacgctgattcggagtttgaagcagactgtgattctgaaactaacgcactatctgaagcggattcggagtttgacactgactgtgactcagacactgatgcactttctgaagcggattcggaatttgatacagactgtgactcagacactgatgcactttctgaagcggattcggaatttgaaacagactgtgattcagagactgattcacttactgatgctgactcggagtttgacactgactgcgactcagacactgatgcactttctgaagcggattcggagtttgacactgactgcgactcagaaactgatgcactttctgaagcggattcggaatttgatacagactgcgactcagaaattgacgcacttaatgaagcggattcggaatttgagactgattgtgattctgagactgattcacttacagatactgactcggaatttgattcagactgtgataccgatgttgattcacttactgacgctgactcggacgttgaagcggattgtgattctgaaattgattcacttactgacgctgattctgagttagacactgactgtgactcagacactgatgcactctctgaagcggattcggaatttgaaaccgattgtgatgtcgacgttgattcactctctgaagctgaccctgaattagacactgactgtgattctgaaacggaagcacttactgaagcagagactgaatttgattcggattgtgaagctgatgtcgactcgctctctgaggctgactcggagttagatactgattgtgattctgaaattgacgcacttactgacgctgactctgaggttgaaacagactgtgattctgaaactgacgcactttctgacgctgactcggaattagacactgattgtgattctgaaactgacgcactctctgaggctgattctgaattagatacagactgcgactcagacactgacgcacttgaagatgctgattcggagttagacactgattgtgattctgaaactgacgcactttctgacgctgattctgaattagatactgattgtgattctgaaactgatgcactttctgacgctgattctgagtttgagacagactgtgattctgagattgattcacttactgacgctgactctgacgttgaagtagactgcgattctgaaactgatgcactttctgaagcagagactgaatttgattcggattgtgaagctgatgtcgactcgctctctgaggctgactcggagttagatactgattgtgattctgaaattgacgcacttactgacgctgattctgagttagaaactgattgtgactcagaaattgacgcacttaatgaagctgattcggaattggatactgattgtgattcagaaactgacgcactctcggaagatgactcggaattggatactgattgtgattcagaaactgattcactttctgatgctgattctgaattagacacagactgtgactctgagattgaagcacttactgaggcactttcagagttagaaaccgattgtgatgctgaaattgactcacttactgacgctgactcggagtttgagactgactgtgactcagacactaatgcactttctgaagcggatttggaattagatacagactgtgattctgagattgattcacttactgacactgactctgacgttgaagcagattgtgattcgcttactgatgcactctctgacgctgattctgaggttgaagcagactgtgattcagaaactgatgcactctctgatgctgattctgaattagacactgattgtgattcgcttactgatgcacttactgatgctgactcggagtttgagactgactgtgattctgaaactgatgcactttctgaagctgattcggaatttgagactgattgtgattctgaaactgactcacttactgacgctgactctgaggttgaagcagactgtgattcagaaactgacgcactttctgacgctgattcggaatttgagacagattgcgatgccgatgttgactcacttactgacgctgattctgagtttgaaacagactgtgagtctgagacagacgcacttgttgatgcagactctgaattagacactgattgtgattcgcttactgatgcactttctgaggctgattcggagtttgagactgattgcgattctgaaactgacgcactttctgaggctgactctgagtttgaaacagactgtgattctgaaactgacgcactttctgacgctgattctgaattagatacagattgtgattctgacacagacgagcttgttgaagcggactcactcaaggaacttgaaacactcgctgacttaacggtactcaaagacacactcgttgaagcggactcactttgtgagacacttgtcttcaaggactcactcaaggaacttgaaacactcgctgatttctcggtactcaaagaagcactcgttgaggctgactgactttgagaaacgctagtcttcaaagactcactcaaggaacttgagacactcgctgacttcacagtactcaaagacgcacttgttgaagcggattcactttgtgaaacgctggtcttcaaggactcactcaaggaacttgagatactcgctgacttcacagtactcaaagacgcacttgttgaagcggattcactttgtgatacgctggtcttcaaggactcacttaatgaacttgaaacgctcgccgatttcgcagcactcaaagatgcacttgttgatgcggattgactttgtgagaggcttgtcttcaaggactcactcaaggaacttgaaacgctctcagatttcacggtactcaaagacgcacttgttgatgcggattgactttgtgagaggcttgtcttcaaggactcactcaaggaacttgagacactcgctgatttcacggcactcaaagacacacttgttgaaacagattgactttgtgagacgctcgtcttcaaagactcactcaaggaacttgaaacactcgctgatttcacggtactcaaagacgcacttgttgaagcagactggctttgcgaaacgctggttttcaaggactcactcaaggaacttgaaacgctcgctgacttcacagtactcaaagacgcactcgttgaggctgactgactttgtgaaacgctggtcttcaaggattcactcaaggaacttgagacactcgttgatttctcagcactcaaagatgcactcgttgaagcggattgacttcgagattggctggtcttcaaagattcactcaaagaacttgagacactttttgaggctaccgtactcaatgaaaggctagtcgatgcagactgcttagcagactcacttcgactttgagaaatcgattcctgcttagactgactggcactttgcgacactgactggctgtaatcactatccgacaatttcaccgtcacaacattggtcgtactgtctttataagtaatcgttaccgtaccatcactattaaccgtataagacttaatacggttggcgacctctggattcaaggcagacacggccgcaataatcttactcttatctgcgtctgttagggcagtcaggctggtcacctgaatagtgcttgtcggcgccacacccggtgtacgatctgccaagcgcccctgagtaatacgaatttcacccaagccatttggacggttcatatttgatgcattgtcaatagcagcaacattacgttgccatgtgttgcggtatgaatgataaagatcatccttcaaatgaatggtcgttgtgatggttgcaggattatcagtcgtagctgtgatatctcccgtaatcggtgcaatattaccagttccgtactggctactaccaaagaaattgccgttcaaggcattgtcattcaaatcggctcttgcaacgactttcatttctttaagcttgccactgtcatctgtagccgtgaaagtcaaaacagcatcatcaccagcatagagggtatagtttttcccaccaccttcgagaggcgttgacttaggttccacaccatcaacagtcaacttggccatcacttcaggacgcgttccgtccgttacagccacggaattgctagcatctgaatacaccgcataatcaccatacatgatgcgagctttggctgttacaccacctgtttgtaacttaacagtcggcgtcacaatcgcttgacccgaagcatctgccactgctgtcccaacttcgtcgtcattattgtatagaacaaccgttgatcctggctcagcccctgtcaccgttacaggcgtctgtgtataacccttatccaataatctcgtttcaacggttggtgctggtaggcgcttcactggagcagtgacatcattagtggtgttatctttataagtaatggttaccacaccagatgatgaaacggaataagatttaaagtcctttgaagtggcaatatttgggttagcagtcttaaaagcctcccaaaccttatctttttcagcctgagcgagactacttgtgtcattaacaaaagtactcgttgtcaccgccgtaatcggattacgaataccatcattttgcggcaaaacctgaatacgaagcgtgcgtgtcactgactgcttagccgtattagtcactacaaaagaaacattataaattttcccaggcgttacgacctctgtctgcccaacagtccccacaatattaaaggccactgcactatttttcaatgcagaggtctgaggcacgttaatcccattcacacgatcactaccagaagcgtagccaatgcttttaatactatttcgtgtaggaacggtttcaacaacattataagcctgattgatatagtcagagttataaacagaaatcaaggcattgttagctagccctaaattatactggggtgcacggaggttactattagcatcaattcgagaaccattacgaggatcacgttgaccagatgtcgcgcgaagaaccgcattggcaagactatttctcgcctgacgagcctgagcaatcgtaggcgtcacatcactgtcacgatcagccagactaacacgaatggcatccagggctttagctcccttgagaatagcagcatccgtatttggcaaatcaacagcttgagctttataggtataaatgtctaaggctaaatctttgagacgcttttcttgctctaaacgctcagcatcagccacaactgacgcagctagcaaaccagtcgccgtatctgacaattggcgattcgtttgaacttcggatgtcaaggaagcctttaataaggttgactccgagctgacaagagccatccccactttagagtcgctactactatcacttttgctaactgactgaacagaggcacttgcgctatgctctgaagtttttccaagcgcactctcagactgactgtgagcagaagaatccgtctgacttactgattccgacttagaagctaatgaagctgacaaggaagcagaaagcgaggcactcaatgacaaggatgtcgatttagaagctaattcagatgcagacaccgattggctgagtgataaagactcactcaaagaagcctccgaagtctgtcttgacgcagtttcagatgactcttgactatttacttgactctcttgaacactggacacagactccatatttccaagaacaacggaatcagatgcagctaagagatcagtcttagctcctgcttcactttccaaaatcggctgatcagtcatttcatccgcatgagccacgtgagtcgcaactgaaccaccaagcaaggccccagttgcaagcactcccttaagcactgtctgacctgaaaaggcaggtgcttccacctctacctgctgggcagcaacagacggtgcatccacaccccctctaagcaccttgaaaagaccaaaattcgacgtcgccgcgcgaagccagtgcttccctgacttaaccaatttaaaccgtgtcacacgatcggtttcacgatattgaccttcattccttctaaaaaacatatatactccatttatattttgattaaaacactcctttcaattttatcataaaattaagcaaaaaatctcatttcaagattgctttctagcgattaatcctttcattcatttcccaaaaaatacgataataatgctaaccctaagacttattaaaactatttgtatttttagaatatcaaactaaaaaaatcccctaccaattaggaaatcactctaatcgataggggatatttgattgtctagctagaagctaatgattaaacttactaaagcttagaagtcttcactttcttcttcatctttcttacgtttggcaagaaatccaagacccgttgcagttgccaaagcacccaaggccatacctaatgatgagttttcctcaccagtcttaggaagcgcttggctaccacgtttgtggttaggatccttcacttcagaagttgattctgaggcagatactgaagcacttgttgatgctgacgctgaaagacttgctgatgtactcaatgaagttgagatacttgttgaagtgcttgtgctttcagaggcacttaagaatgccgatgtagaggctgactctgatactgaaactgaagcggatgtgcttactgactcagatgtgcttgctgattctgacgcagatgctgaagctgaggcgcttgctgattctgatgcagagactgatgcagatgtgcttgctgattctgacgcagaggctgactcagaggcacttgctgattctgacgcagagactgaaacggatgtgcttgctgattctgacgcagatgttgatgctgactcagatgcgcttgctgattctgacgcagagactgaagcggatgtgcttgctgaagcggatgcacttgctgattctgatgcagaggctgaagcggatgcgcttgctgattctgacgcagagactgaagcggatgcgcttgctgattctgacgcagataccgaagcggatgtgcttgctgactctgaggcagagactgaagcggatgtgcttgctgattctgacgcacttgatgattctgatgcagagactgaagcggatgcgcttgctgattctgacgcagatgcacttactgattctgatgcagagactgaagcggacgcacttgatgattctgacgcagagactgaagcggacgcacttgatgattctgacgcagatgctgactcagaggcacttgctgattctgaggcagatactgaagcggatgtgcttgctgattctgacacagatgcggactcagaggcacttgctgaggctgacgcagatgttgaagctgaggcacttgctgattctgaggcagatactgaagcggatgtgcttgctgattctgaggcagatgttgaagctgacgcacttgctgattctgaggcagatactgaagcggatgtgcttgctgattctgacacagatgctgactcagaggcacttgctgattctgaggcagatactgaagctgaggtgcttgctgattctgacgcagagactgatgcagatgtgcttgctgattctgacgcagatgctgactcagaggcacttgctgattctgacgcagagactgatgcagatgtgcttgctgattctgacgcagagactgatgcagatgtgcttgctgattctgacgcagatgctgactcagaggcacttgctgattctgacgcagagactgatgcggatgtgcttgctgattctgacgcagatgctgaagctgacgcacttgctgattctgacgcagatgctgaagccgatgtgcttgctgattctgacgcagatgctaaagctgacgcacttgctgattctgacgcagatactgaagctgacgcacttgctgattctgacgcagatgctgaagccgatgtgcttgctgattctgacgcagatgctgaagctgacgcacttgctgattctgacgcagatactgaagcggatgtgcttgctgactcagatgcagagactgatgcagagactgagtttgaaacagactgtgattctgagacagaggcacttgttgatgcagactctgaatttgaaactgattgtgactcactgattgaagcacttacagatgtactttcagaattagatactgattgtgagtctgaaacagatgcactcaatgacgccgattcactcaatgatgctgagttagatgttgaaattgattcactagctgaaatgaagcttgaagccgagttcgaaatagactcaacagttgaaatgattgcagaaattgaagcactgaaggcttgagactggctttcaaatacagaagcactcaatgagcttgatgtactcaatgattctgattctgaagccgaaactgacgtacttgtacttcgagattcactcaatgatgcagactcactagctgaaattgaagcactttctgacgctgattctgagttagacactgattgtgattctgagattgacgcacttactgatgctgattctgagttagacactgattgtgattctgaaaatgacgcactttctgacgctgactcggaattagacactgattgtgattcgcttactgatgcactctctgatgctgattctgaattagacactgattgtgattcagaaactgatgcacttactgatgctgactctgagttagatactgattgtgattctgagacagaagcactttctgatactgattctgaattagacactgattgtgattcgcttactgatgcactctctgatgctgattctgagtttgaaactgattgtgattcagaaactgatgcacttactgatgctgactctgagttagatactgattgtgattctgagacagaagcactttctgatactgattctgaattagacactgattgtgattcgcttactgatgcactctctgatgctgattctgagttagacactgattgtgattctgaaactgacgcactttctgacgctgactcggaattagacactgattgtgattctgagattgattcactttctgacgctgactctgagtttgaaacagactgtgattctgaaattgattcacttactgacgctgactctgagtttgagacagactgtgattctgatacagaagcactttcagatgctgactcggagttagacactgattgtgattctgatacagaagcacttgttgatgctgactctgagtttgaagcagactgtgattctgaaactgacgcactctctgacgctgattctgaattagagacagactgtgattcagaaactgatgcacttactgatgctgactctgagttagatactgattgtgattctgagacagaagcactttctgatactgattctgaattagacactgattgtgattcgcttactgatgcactctctgatgctgattctgagtttgaaactgattgtgattcagaaactgatgcacttactgatgctgactctgagttagatactgattgtgattctgagacagaagcactttctgatactgattctgaattagacactgattgtgattcgcttactgatgcactctctgatgctgattctgagttagacactgattgtgattctgaaactgacgcactttctgacgctgactcggaattagacactgattgtgattctgagattgattcactttctgacgctgactctgagtttgaaacagactgtgattctgaaattgattcacttactgacgctgactctgagtttgagacagactgtgattctgatacagaagcactttcagatgctgactcggagttagacactgattgtgattctgatacagaagcacttgttgatgctgactctgagtttgaagcagactgtgattctgaaactgacgcactctctgacgctgattctgaattagagacagactgtgattctgaaactgacgcactttctgacgctgactcggagttagacactgattgtgattctgagattgattcactttctgacgctgactctgagtttgaaacagactgtgattctgaaattgattcacttactgacgctgactcggagttagacactgattgtgattctgatacagaagcacttgttgatgctgattctgagtttgaaactgattgtgattcagaaactgacgcactctctgacgctgattctgaattagagacagactgtgattctgaaactgacgcactctctgacgctgactcggagttagacactgattgtgattctgatacagaagcacttgttgatgctgactctgagtttgaagcagactgcgattctgaaactgacgcactctctgacgctgattctgaattagagacagactgtgattcgcttactgatgcactctctgatgctgattctgagtttgagacagactgtgattctgaaattgattcactttctgaagctgattctgaatttgagacagactgtgattctgaaactgacgcactttctgatgctgattctgaattagacactgattgtgattctgaaattgattcacttactgacgctgattctgagtttgaagcagactgtgattcagaaactgacgcactctctgaagctgattctgaatttgagacagactgtgattctgaaactgacgcactttctgatgctgactcggaattagacactgattgtgattctgaaactgacgcactttctgatgctgattctgagttagacactgactgtgattctgatacagaagcactctctgatgctgattcagaattagacactgattgtgattcgcttactgacgcacttaccgatgctgactctgagtttgaagcagattgtgattcagacactgatgcacttactgacgctgactctgaagtcgaagcagactgtgattcagacaatgatgcactctctgacgctgattctgagtttgacactgattgtgattctgaaactgacgctgactctgagtttgaagcagattgtgattcagaaactgacgcactctctgacgctgattctgaattagatacagactgtgattctgaaactgattcgcttacagaggctgactcataatttgagactgattgcgatgccgaagttgacgcacttactgacgctgaagttgagttcgactcagactgagatgttgacgttgaggcactctctgaagcagagactgaatttgactccaactgtgatgcgctcactgaagcacttgttgaggcactttcaagaagactttctgaaatactctctgaaagagatgctgatgcttcctctgattgagaaagagaagatgaaacaacctctgactcagatactgaaactgatgcagattctaccttacttgttgatacagattgtgactctactgttgaagcactttctacgaggctctgagaagcacttagagatgcacttgttgtatcagcttcagattcagactcgataacctgactaccattaaagaagttaacgttaaaattatctgtcttacctgcataaggtgagaaggtaaaggaagtatcatcaccagtgattttagcagtccaagttgttgtcagaccatagctttgcttagcctggtaaccattcatttggataccatttgaccaactaaaaccgtctccttgacttgttactggtgttgtattagccttaggatttgcaacttggttaccatttttatctgtaatataagacgttacgcttgtcggagcactaagtcctgtaccaagggtaaacatcgtttgtgttgatgtccctgaattatagatagaatatccaggactcaacttcgaaatattcccaagggttgatgttgcaggattaacatatgtgacagtgtagacaaaattcagatttgtcccgtcatttgttactttcaatgtatagtaaattggaacattatagtttgtatctgttccagttcctgtataaacctttgtctcaccagtcgctaggttaaggtttgaagtgatagctggagtgccattcactgtagagtttccattgaaaccagcatttgtaagcttggtcatcatgttatcaacggcattaccaagacgctcacgctgttctgcgtaagctgcgtttgttgctgatgccgcgatcaatgtcgttgacttagtaacttcttcttgaactgttgtaatagccgtttggatttcagccttagccgctgtgtctgttaattttgcttgatagtttttagcaatattaacgagcaattccgcttctgaaacgttttgatccaagatagttttttcatcctcttggcttgcagtttctgaagcaactgagcttgttgaagttactgaatcagaagctgattctgagtttgaaccacttgtgctttcagtttctgactggctatcagaagttgagtactccttgctgagtgatgcagattctgaaatagcttgtgacaattcagcagaaattgattgagagacagattgtgatactgaaactgatgcttctgtgcttgcttgagcatctactgaagagcttgtagactcttgactagttgatgctactgctgaagcttctgaagctggcgccgcactcaatacaactgactcagagttgactgccacatcttgattagcagttacttggctctccaaagctggagttgtcgtttcttcagcttgggcagtgtaagtcgctactgcgcctccagcaactgcacccgctgctgcaatccctttaaggagagcttgccctgagagaagcggtgttttttcttcaacactttgcgctgaaactgatggtgcgtctgccccacctttaacaaccttgaaaagtccaaagttggatgtcgcagcacgaagccattgcttacctgatttaatcaatttaaaacgagtcacgcgatcagtttcgcgatattccccttcgttccttctaaaaaacatatctactccattcttgttttatgaattaaaactcaccgataaattttatcataatattcttgtaagttctaatataaactactatttccctcaaaaatgattgcaaacgctttatgctatataaatactgaaaatgcttgtttcatagcattttcacccatcttacattttgcaaaataaaacttaaagttatcttaaaattcaaagcatacttctactacatctaagatttcagcttactaaactaatcctctcctctataatactaagaccaaatgagacttagactaacaattaagataggctctctcattttcaagaacgacaaaaagacacaccccatatcggaatgtgtcttttttagaacgaagctaatcggcttattcttacttaagagtagttagtttttattaggactaatcactcataagttttaggggtaagtcgaaggaatattattcctcagtttttttgcgttttgccgcaagagccaatccagatgcagttgcaagcaatccaagagctgctgtagctgctacgttagactcttcaccagtgtttggcaattgtgccatttcttgtgcaggtttaactggagtagctttagctggagctttaggagctggatcaactggtttacctggagttggttgttcaggtttacctggagttggtgttactggtttttctggagttgtatcgacaagtttgtaaacgtaagttacgttcttatcgccttcgatgactttaccagttactgggtcagttgtagtcaagtgaccatcaccatctacagaacctactgggtagttaccttgtggtaccaattcgtaaactttaccatcagcagtaacaattgtcttaggacggttatcgattactgtatcgtaatctttacctactggttgaccaaattcatctgttactgattgtttgatagtgttaccattttcatctacatagtgaacgtaaacattacccttaggttgtgctggttgttctttgagtttgtagatgtaagtaacgtctttacgtccttcgataactttacctgttgtagcgtctgatgactcaaggtgaccttgtccatcaactttacctacagtgtagttacctgctggtaccaattcgtaaactttaccatcagttgttgtgatagtcttaggacgattatcaactactgtatcgtagtctttatctactggttgatctttttcatcaacaactgaagtcttgattgtgttaccttcagtatctttatagtgaacgtaaacgtcacctttcacttctttgtagacgtaagtgatgattgaacgtggtttttcaactttacctttaattggatcagatgattcaaggtgtccgtcaccgtcaactttacctactgggtagtcacctttcggtacgatcttgtatgtcttaccgtctggagtcttgattgtgttaggtttttcaccttcctcagttgtgttatatggagtatcatatggtgagtttggtgtgtcttgacgaggtttcttgatttctttacctttttcgtctacgtaagtgatgattacgtcaccttctttaggtttcgttggatcttctttaagtttgtagacgtaagttacgttcttgtcgccttcaacaactttacctgttgtagcgtcatcacctgtccagtgaccttgttcgtcgacttgacctactttgtagttacctgctggtaccaattcgtaaactttaccatcagcagtaacaattgtcttaggacggttatcgattactgtatcgtaatctttacctactggttgaccaaattcatctgttactgattgtttgatagtgttaccattttcatctacatagtgaacgtaaacattacccttaggttgtgctggttgttctttgagtttgtagatgtaagtaacgtctttacgtccttcgataactttacctgttgtagcgtctgatgactcaaggtgaccttgtccatcaactttacctacagtgtagttacctgctggtaccaattcgtaaactttaccatcagttgttgtgatagtcttaggacgattatcaactactgtatcgtagtctttatctactggttgatctttttcatcaacaactgaagtcttgattgtgttaccttcagtatctttatagtgaacgtaaacgtcacctttcacttctttgtagacgtaagtgatgattgaacgtggtttttcaactttacctttaattggatcagatgattcaaggtgtccatcgccatcaactttacctactgggtagtcacctttcggtacgatcttgtatgtcttaccgtctggagtcttgattgtgttaggtttttcaccttcctcagttgtgttatatggagtatcatatggtgagtttggtgtgtcttgacgaggtttcttgatttctttacctttttcgtctacgtaagtgatgattacgtcaccttctttaggtttcgttggatcttctttaagtttgtagacgtaagttacgttcttgtcgccttcaacaactttacctgttgtagcgtcatcacctgtccagtgaccttgttcgtcgacttgacctactttgtagttacctgctggtaccaattcgtatgtcttaccttggaattcgatttcttttggacggttgtctactactgtatcgtagtctttacctactggttgatctttttcatctgttacagatgctttgattgtattaccatcagtatctacatagtgaacgtaaacattacccttaggttgtgctggttgttctttgagtttgtagatgtaagtaacgtctttacgtccttcgataaccttacctgttgtagcgtctgatgactcaaggtgaccttgttcgtcaactttacctacattgtagttacctgctggtaccaattcatatgtcttaccattgtattggatttcttttggacggttgtcaattactgtatcgtaatctttatcaactggttgatctttttcatcaacaactgaagtcttgattgtgttaccgtcagtgtctttatagtgaacgtaaacgtcacccttcacttctttataaacgtaagtgattgttgatttaggtttatcaactttacctttaattggatcagatgattcaaggtgtccgtcaccatcaactttacctactgggtagtcaccttttggtacgatcttgtatgtcttaccatctggagtcttgattgtgttaggtttttcaccttcctcagttgtgttatatggagtgtcatatggtgagtttggtgtatcttgacgtggtttttggatttctttaccatcattctcacggatataagtgatgattacttcaccaactttaggagtttcactttcagacattgattcagaaattgaagctgaagttgattcagagcttgaaagtgattctgaaactgaagttgaagttgatgtagattctgaaaggctagcagatgctgagtatgattcagaagctgatactgattcagatacagaagttgattctgaagagcttgctgattctgacgcagatactgaagctgatgtgcttgctgattctgatgctgatgctgactcagaggcacttgctgattctgacgcagatgctgactcagaggcacttgctgattctgatgcagatactgactcagatgcgcttgctgattctgacgcagatactgaagctgatgtgcttgctgattctgacgcagatactgaagctgatgtgcttgctgattctgacgcagatactgaagctgatgtgcttgctgattctgacgcagatgctgactcagaggcacttgctgattctgatgcagatgctgacactgaatcactcaatgaagctgattctgatgcagatgctgactcagatgatgaagttgattctgattctgagttattagtaacgattgaaattgattcagagattgaagctgaaactgagatagattctgaagttgaaactgactcagatgcgcttgctgattctgacgcagatgctgactcagatgcgcttgctgattctgatgcagatactgaagctgatgtacttgctgattctgacgcagatactgactcagatgcacttgctgattctgacgcagatactgactcagatgcgcttgctgattctgatgcagatactgaagctgatgtacttgctgattctgacgcagatactgactcagatgcgcttgctgattctgacgcagatgctgactcagatgcacttgctgattctgatgcagatgctgactcagatgcgcttgctgattctgatgcagatgctgacttagacgcacttgctgattctgattgtgatacagattgtgacttagatactgcttctgattctgattgtgatacagattgtgacttagacactacttctgattctgattgtgatacagattgtgacttagacactacttctgattctgattgtgatacagattgtgacttagacactacttctgattctgattgtgatacagattgtgacttagacactacttctgattctgattgtgatacagattgtgacttagacactacttctgattctgattgtgatacagattgtgacttagacactacttctgattctgattgtgatacagattgtgacttagacactacttctgattctgattgtgatacagattgtgacttagatactacttctgattctgattgtgatacagattgtgacttagacactacttctgattctgattgtgatacagattgtgacttagacactacttctgattctgatagagattgtgacttagataccgcttctgattgtgaaacagattgtgagttcgatactacttctgattctgatgcagaatttgagaatgattgtgattgagatgcagactctgagtcattcatcttcacgaagtaatagttcacatcagttgaaggcttaatcgcagttggaattgagtagttgttagagaatgatgtgtaacccttcaaatcagagtatactttaccatttggtgctgttggatcattcgcaacagatccttctgcttggatttctggaactttaccagcgattacgttgtaactgttgttaccagcaccagcaggtgtcaatgaagtacttggggcacctttaaatggacgtggataagtgtgtagagttccatccatttgtttataagtatctgtctcagtagtagacgaccaaccagtgataatgagggatttgcttccaacagtttcgttgacttcaatatagtagtcaccatttttgctgtttacttttgtaacttttgtctcatcagctttccactcttcaccagctttgttaactttacttgtatagattagtgtgtacttagatacatcttcagtaccaatatctgatgtagcaaaattgttaacctgtgatggatcaagggcgtagaatttcgttacagttgagccatcagtatcaacgatttcagaaatacgtttcacgtagtagtggtttgctccaccttgaagttcgacaagtttttgtccaacaacacccttaccgagaatacctgatgttttttgagttgtatctgttttggcagctacaggtttgtaaccagcaacatcacgatttcctgaggctgtgaattgttgccctgcaagacctgtttgagtatagcttgcaagaactgtttcatttccagttggtgtgtatgtttgaccttctgtgtacttgctactgtcaacgactttatagtaagttgtttgatcagctttagcataaggaacagaagtttgaacgttttgtttgtcttcaccttggttacctgggtagttagtatcacggatttgaagtgtttcatactcaaggttagcatttaccaatgagaaggtaacgttacctggattagttccgttagcagctgcgtatgtcaaagtgttagttacatcagagttgttgtttgtgatgtagcttggaagtgagatattgctttctcccgctttgattgtacgagtgtaaacttctgaaccatcagacttcttaacgatacgcaagtaaacatctgggttagctgaaaggctaccagtgattgcagaacggtctactgaaagagtagcatagtaatcaaagtttgttttagcaccagtagtgtggtttgttttaaggaattgccatacaccgaaagtgaaacgatcagcgtttggatccaaagcataaccagcttcattgaaggctgcatcttcaatcgttgcaccattcgcatttgaaattactgggttagtatctacactaccagtagtgcttgttgagattggtgccaattgagctgtcactgctgcaacaccgttaactactgagttacctgtgaagccgttgtcagtgatcttagtcatcatgttgtcaacagcgttaccaaggcgctcacgttgttctgcgtaagcagcgtttgttgctgatgcagcaagcaatgtagttgatttagcaacttcttcttgaactgttgcgatagcagtttggatttcagctttagcagctgtatcagtcaacttagcttggtaatctttagcgatacctacaagcaattctgcttctgaaacgttttgatccaagatagttttttcatcttcttgagtagcagtttctgatgcagttgcagctgttgaagttgctgattctgaagctgattctgaatttgaaccgctgttgctttcagtgtgtgattgactttcagaagttgagttcactttgctaagtgatacagattctgagatagcttgtgacaattctgctgatacagattgtgatactgaaactgaagcatctgtgcttgcttgagcatcaactgaagagcttgtagactcttggcttgttgatgctacagttgaagcttctgaagctactgtttctgatactggagcagcgctcaaggcaactgaatcagagttagcaatgatgtcatggtttgtagttgcttgggtttccaaagctgatgcagttgtttcttcggcttgagcagtgtaagttgctactgcaccacctgccacagcacctgctgctgcgatccctttaagaagagctgtacctgaaagaagagaagatttttcttctacattttgaactgttactgacggtgcgtctgcgccacctttaacaactttgaaaagtccaaagttagatgttgcagcacgaagccagtttttacctgatttgataagtttgaagcgagtcacgcgatctgtttcgcggaattcaccttcgttacgtctaaaaaacatatttacctcctaaaaatatgagtcatttcctaatctggaaattacattttataatataacacaagttgactaaaaattgttcttttttgtctcattttctctaaaaaatgtaaggttttcgcaattctgaattttctgttttttaacactagttaatcttattttagaagtaaaacggtttaaatacttgtttttacgctatttcccgtaggttttctcatttttaaagtcatcactttttacttttaaatttttctacaattcgatttgtagtaaattttcgaacaattacaatcaattatttagggctatttttttacatttacaagtcgattgtcaggtgtttttttaacattagtcctaattagagacaggtctttcttaactccttaagtctaaagtgaaaatgatttgagtgattttcataaaagtcaagatatatgctcagatttatagcaaaaaaggattatctttcgataatcctttatctgttaactcaaggccataatggcatcgatgaaaagtttcttggtgaaataaccgttactgatgaggtaggctgtgtggcgagcgttagctaccatctgtgcatactgctcctcagtacattcttgaacgcaacggtctgcttcttcgagacttgaaacgacaaagcctagaccatgttccttaatatagtctgcatttgagaggtagtcaggtacaaccactgggagacccgcagctaagtaagtcgacagtttgtaagagatgttcatcttatagtagtcgggctcatcctctggattttcggaattaccccagaccagaccaaagcctcctttagatagctctagcaaaagctcatgtttatttcgccaaccttcgaggtgtactttggaataatccttatcttcttgtttctcagcgtagacgtggagaggtgtcgtttgtttccaatctaggacgtgtgggaaacgggttgggttcccagcaaaaatcattttcttctggaaactaggttggtgtaggtcaagactgtgaggtaagtcccaaagtttttggatgataaccttctcaactgttaacccttcctcaatcaatcgatcacgcatcttttcagaaggcaccacgacgacatcacagagattatacatgtcaatataagcggacatgagatagtagttactatcaaacataagaggtgggatgtcatggataaacataacggtcttagcattaacagccttgaatttacggagtagtcggctatcccactcactaccattccatgatggggactggaagaaaacgatatctccaacgctcagtcctgctacaatcccatcaaagcgggaatttagctctccatctggctcttggctactatcatagaaataaattcctagttcattagcaccgagctctttggcaatcttcatggtatcattttgggcaatcaaggccacactacgtgaggactggccaaataaatttgtaaaatgtacgcgcatgacatacttctttctattatatagtaggaagtcctctacttataagaaacaatcataaaaataagtaagaggataaagagggctatgctgatagccaaggtcaacatttttcgaattggttggctagcccaataacttggtttaccgatattactcgtggcatccgttgaaaaaatctgcgtttgacgcggttggatggtcactaggacgataagggcaaccgaaagaatcactgctagaaccataaatactaacatcataagactacctcaacaaaccaataagagtgaagatcaaaccgatgataataacaagtccaagcatgattgaaaagctcttgttaatcttctctcctctggtttctttttcttttgtgataggcttttgcttgagttcttccatacggccttcaacgtcaccgtagaacaaatcttttttagacatgatttcctcctaaaagtgattgtaagcggtcggccaactcagaggcagtcagggtgttggcttgagctttttgagcttgcatggcttcttgcatggcttgatcattatctagaacctgcttaatcttggcaaccatagctggatagttctgactggcatagatatgctctggcgctgtatagacaggtccatgagctgtttctgaaaaggccaaaatcaacaattggtgttcaaaggcagttcgtgtcgccttatacaattcattatgatggttaatgtccaagtagaggtcagactcttgatagagcttgtccaactgcttgtgactagcgtttggatggagcacaacgtttgaataacgcatcattgaaagcaatcttggcgacatttcagtgactgctgcaatctggaaggtcacatctgggagcgactcaaccaagacttccaaacgctcaatttggtctgagttcgttgcaataaaggcattacgaggtttgccatgattttccttgaagtcataggcatagccaagagacaagatcttatgatgtttgtcctctggtgccaaggtcaaagctttttcataagttgccttatcaggaatgatgatggcattggctctggctgaattatcctccaagataccattcatgttacctggaaggacatcccccagtggctcttgccagacaaggacatccgtggcacctttattttccatagtccatgagacgatgaaaggtgtcgccaagctattaaagataatgtggtcaatatcaccaaagacctgagctagaaagactttgataaattcggtacggttggcgaaacgacgaagggcttgtcctggtagggtcaagagaatatcaccggtgagatgattttccaagatacgttcgtcgccttctttggtttggtagctggtaaagactgcctgaccattctcatcatgagtggtcttggcaaagcagaaaccgtacttgttgtagtggtccacttggcgaatcttacctgacttgtccaaccattcgacacttttgacgatacgagccttgctaccttctgggtaggtgatgcgggcacgttcttcggtaagattagacacacgcgccatctgattgttccctgaaatttcccaaaaggctggcacaggaacttggttgaaaaagcgtggtttgccagtttcctcttctgcttccacataataggtgaaaggagagagagcgtcttgagggagaaaaccatctggattgatgacaactgttgtggcatcatagcctgctacctgaagtgagtaagctagatccttactggcttgattgtagtaatcacataagaatatcatgagcgtacctcctcaagtaactgtttccaagttgccttgacttgactggtcaagaagcctttggcaaggtcataagatttttgacgcatggcttcgatagtgtctttttcatagagacggacaatggcatccttataggacttggtgatgacatccacaacatgattttcagcgacagggaggagataaccgttgcccccgtcttcgataaaggtttgatttccataaggcacatcaaatccaatcatcggaagacctgaaccaaccgcctccatgagagtaaggccaaaaccttcactggttgaagctgtcagatagacctcgtactggctataaatgtcagtcaagtcagcgtgacccatgagtctgatatagtcgccagcttgtgcttcgactataatctcacgcaacttggcatccatactaccactaccgtagatatcaaaagtgatatcaggcaaggtcttatgaacctcaatcaccgcacgaaccaaccagtcaatgtgtttttcctgagccaaacgtgaggccgtaatcattgagaatggcttacgtggcttgtcttgtccaaccaattcaggtagacttcccactggaatggtataaatctttggatcatggttggtgtagcgacggaattgttcctgtaagatttccttctgacgatcagtcgccacgataaagaaatcaaccttgtccgcattggtaaattggtactcgtaatagttattccagagaatgtagttgtcatcagtttgattgacactaaaatgttcagcgtgaacaacgacacctaggcgagcagcctgcgcttcttcaaagaccaactgaccaatacctgtttcacggtccaaaatgaccacatcatccttggttagggccagacgtttgaaaaaataacgaaggaattcttgcttaccatagagaacctgatcagggaaacgatagatatcctgattattgtctcctacaaccatgtcataggcagtcgagccatcttcgttataaaaacggcgttggtaaaccttggcttgattgtccttaggcgcaaaatactcactgcagtaacgggtgtaagagtaaaagtccttacgcaagagcttataattaacaaaatagctgacggtttccactgcatcttcgtccatcgcacgaaggttacatgccactaccatatcatcttgtgggtaatggtaacgaatgaggcggccagctacttccttgcgctcaggattggcaggtaagatagcctcaatttctgctaggctaatagtcgatggtgcaatcttaacatctgtaaaatagctatggagccagatgatttcgtcgtctgaaaaaccaatcttgctagtcatatgctcgatattatctccaaggatgagatccataaagacaaattttgcctcttgtcccatttccctgaaaatcttggcacggtaggcctgggcatattcgacaccactgctggcccaacctatgcctaaattaatgttatatactgtcataatttccttattttatgggaaatggctgatgatatctccttttttagtgacttgcacctgactaaggagaagattacgaaccatatcctttctgatttgacgtttcatggcttcaaagcccttatatgcctcttggtaatattcaacaatcgggttcttttgactgagttgttgactaccaatagccatttgaagttgttgcagatagtctacctgctccacccagttgtcatccacagccttaagcatggataggcgttggaaatactcgtttagttccttggttttcaactcctgcttcttagcatcaagttcacgataggcaaactggtagatgagttccaagacttcctcacgattgtcgaggtccaaatccttaggaatttcattgatgcggaagctgatattacgcaagataaaatggtaaagattttccgcttttgagaaatcttcctcagccatagcctggtcaatgaagtcatcaagaacctcgtcgataacagtgtccaagccttgattgtgatagatgaggcggtcacgttgcgcgtagatcatctcacgttggatgttcatactttctgcgaactcaagggtctgacgacgtgaggtacgaccagaactttcactggcttcttgggctttttcaaccaatttacgatacttacggcctgtcaattctttaggctcgatgtgatcactaatggcgtattctttgtaagtacggtgaacccaagatggaccgtattttttaatcacgtcatcttcaagtgagacaaagaatttagacataccagggtcaccctgacgtccagaacggccacggatttgcaggtcaatacgctgactttccatacgttctgtaccgataacgaccaaaccacccagttcagccacacccttaccgagcttgatatctgttccacgtccagccattgacgtcgcaaccgtcacagcacccatttgtcctgactcagcaatcatctcagcctcacgtggcgcattgttggcatttaggaggttatgagcaattccttcacgcaaaagcaaagaagaataaagctcagacatttccaccgaaccaacgaaaatcaagattggatttcccttttcatgataatgcttaacatactctaaagaagcaaagaccttctctggtagggtcgcataaatcttatctgggtaatcgatacgttgtttcttacggttggttgggatttgaataaccttcataccgtaggtatcgagaaattctttttccgcaaccttcccagtaccagtcatccctgaaattttcttgaattttttaaagagactttggtaggtgattgaagccatggctcttgtttcttgtgacaaggccactaattccttggcttcgatggcctggtggagtccaccttggagcttggtcaattccaagagacgacctgtcgatttatcgagaagtaccacttcaggtcccttcttgccatcacgaatgatgtagtccttatcctttttatagagcaagtgggcacgaagtgaaaagagcaggtgacgggcaaaggtactgttttcctcatcgtagaggtttccgataccaaggtaattttcagcagccttagctcctttagtagtcaaccagacttcacctttttcctctttgaagatgtagtcctcaccctcgaccaaggtggtcatcagcgtatccatcatcccatagtagttagactgaacacggggcgcaccagagataatcaaaggcgtttgggcactgtcaagaaggacagaatccacctcatcgacgatagcatagttaaagggacgcatgtatttcccgtcttggttagaagcaaggttatcaatcaaatagtcaaagcctaagctagaattggtcgtgtaaacgatgtctgattgatagatagcacgcttttctgctggttccatctcattgctgccttccacacagggaacaccaatcgtcaaacctaggaactcatagacttgacccatttcctcagcgtcacggatagccaagtattcattggtcgtaaccagaatagccccttctcctgacaaggcattaaggtagaccggcatggtagccgtcaaggtcttaccctcaccggtattcatctcagcaatatggccttggtgcatgacaatgcctcccatgacctgaacatcataagggaacatgcctagcacgcgcttatccgcttcacgaacaaccgcaaaggcttcaggcaggaggtcgtccaagctttctccttgagccaaacgctccttaaattcctgcgttttatttttcaactcaaggttgctcaaaccagccatttcatcggctaggccgttaatttccttgagtatctccttaacagggagaataggattcagttgtttaaacatgttcttctcctgtttcttccagttttaagttgtagaaatccagctctttgaccccagcactcaagagggaaatacggtaggtataggcctcatgaggataaacaaaggtcatgtgggtactcttttcaatgagctgtttgatttcattgtcataacggtccaaaaagctgactttcaaaaagactgagcctgttgggacagcttcgagattggccgtcaaatcataactatgcccctttttcaaaagtgggagggcaggctgagtacgaccagcttgatagttttggatggccacccaagactggatttccgttcctgatggcaccaaaggattgtaaaattgcacagaaccatcttggcgtttaacaatttttgagccatacatgtaggctttgtggtttaagccccacaagatttctgatttcttgtttctgaacattcttactccttccttccaaaatcattttctaaaatcatacggtaaaaattaacaaaccaagttgtcgccgtataagaatcatcgttgtgtcgccctgacgttcccttgctgagaatcttagcccctgagtaatagagagacttagtaatgtcctcgtaggccgtcggatccatatcctcgtctttcatgtaggaaagaccaaaagttgtatttgagaagtctgctttttcaaatttatcccagaacttctgattaagggcctcgacaccttcattatccaagcgtcctgtctgcaaatgcaagacatcaattcctgttggaaagacctctggtgccaaaagtctagcacggttaccgatagtaccaacattggctagaggcttagacatgatgatggcgtgaggctcaaagtccgcaccgtagtacattgatgggaaggttcccatggacattcctgagagaatgagctgactattgtcaaaacctaggtagtccaagtaatgttggatggtgtctttgatgctattttcaagctcttcagttcccatgtagaaggctcccccttggagacgagggtctgaaaagagcaagaatggcgttcccattcccttcatcattccgaaaccttcgaaaccttcggcaggacggaaacctgagaagtaaactgacaaaggtggcttgaagtcaccaggatagaagaaatagttaatttcctgacgcttgctatcgtggagaattcctccaccaagtacaaacttcccaaattggaaacgggtcaaacgttggtggagcccaccgattgtaatctgaccttggcctttcatctcaagactagcagacaagaggaaggtcgtgtcctcatcaaggacaatggctcccttacgcatttcttcttctgaaacgatataggtcttgaaaatacctgcgaccgaaccttctggcaaaagattgagaatcaagcgacactcgcaagtctcctctttttcgaattccaaccaaagctcgataggattttccttgctggctctgacattataggtccagtccaagacaggactgaaatcttgaccataatcaccttttaaaatgacattttcataaccatggtaggtcacttggccagtaaaattggggttaacctgggtcgtgaaaggaaacatcttatccccgtactgccctgaaaagagcgctttcgaaagggtaaagagcaactgcccttgatttgaaaaatcagttggcacggcacacatttccttgatgaactgagcaagtatctcatctgtcacttcaatcgtttgatcaaagaaaatagtgtgaggaatcaaatgctctttaatagccatcaattcctcaagacctgcaagactgtccacaatgacagctgtgaaagtcttgatttcgtcttcttcgatggtttcttgcaaggtctcaagctgaccaagattgcaataataccatttcatattttcaggaatttcctgaatttctgaccagttggatggtccaacttgtagtattttcaggcgattatccttggtcattctgctcctccttcaaccaattttcccatttttgcaccaaacggtctcctgtgttttccttaattttctcaattgagtagataagggaacggttccagttgttcaactgtcctaaatagtagtaagcccctttttcaaaatcggacaagtgcttcaagatataaccattttcttggtgggtcacatactcagacgccacacgattaatttgtggaataccagcactaatccctgcaatttgtgtataacgattaggttccttgctcaagtcgacaatgagtcgtgtaaactgaagggccttgataagggcagtctcgtcacgcaggtcttggaaagaaaatcggcttacgatttcattattttcttccaatttattttctgcaccactactttcgacaacctcttcaaagacttctggactcaatcgttcttcaatcattctttccacttgattttgcaggctaccaagttgctctggattggcattaaaagccccaaactcaacctgtgtcttaggatacttagccacaaaagccaagacctgataaatcgcctctaaatccaattggtcaaagtcaacctgataaaagatcttagattctttgacacgttgactggttcccaaagccaagcgggtatcgaaggaagccatgtgtttgagtttcttagcctcttctggataggcaacctgaagttgctccaagtaatcgtaacggtcagcaatcaacaagtccacttgtggcagaaaggctgcataggtgtcaatactatcgtcctgattacgttctgcgaaccaagtcaaaatcttagtgttggctgctggcaagtggtcaaagaggtgtttgttatggcgtaaatctgaggcgataacaaagcggtcatccgcttctaccttttcttccaagaatttagtcaaaaattcccagataacttctgaaaggtcgccatagtaactcttattaaaacgaccttctgtacgagggttggctacaatcccacgaccatcaaagaaatgacaaagctgccaaacacccttggcattgaggtagtttcgatagcttggttgtccgtcttcataataaagactacttgaaataaaaccgcggtcatcatagatgtcttcgcgaatgatttgctcatccttatagtagcgaatcatgccaataaagccttctgaaccgaactcaatctcggcataacgcttgtgttggcattgcaccacgatagcaaatggtgtgtgaacaaaggtagagccttctggccattccaaatctgtcacctgaaggtttttcatttcttcatcagtgataccctgaatcaagtcaaaaatagccgtataaccaacttccaagacatcatgacgatgtaggaaataacgcaaatgcggttggtaggccaaaagcaaaagctgaggagctaaatcctcatcctgaaaaatacgaacttggtgcaagctgtcatcaaattcgattttttggcggatacggtaccaaggatcaataaccgtcttccaaaattcgtccgtctgtccataccaagctggaataaaataatacatgagttctccttcattgtcttttcatcacaatacttgagattgaggggtagaccgatcacgcatcaccagcctgcctctcaaccccacgaggggtgagatattatacattttcaaaaagtggggtgtaggaagtgttaagcttcaaggctttcatttcctcgttaacgttgtaaatcataccgctaaaaatcaagaacgtcccaggaatcatactcagttgcaggtaatctggattgaccaagataatcaacattggagcacccgccataaagagcatgtaaagggcaccgatgaaaccaagtctaaggaccaaatggttgatataggcactggtttcttgacctggataaacgccgtagatgtactcacctgacttgcgcatacgctcagagatttgctcaccagagacattaacaaaggcaaaagctaaccctagaacgaagagcatgaccagataaacaaccaaccaaagaggttgaccaaccgtcaaggccttgatggcaccactggtccacttgttttcaggatggataaattgaatcagcataaaaacatactgcggaatactaaccagcgacatggcatacatgaaaggcatccctccggctggattcaacataatatccaagtaagaatactgtttaaagcggttatgaatattgattttattgattgagatacggtatctagccctctgcacaacccctgaaatatagaggaagaccaaactgaatagaatcagaggaagcaagacatcccaaccgatacctaacttttcaatactatccatgatttgatagggcagattggccatcatacttgccatcaagataacaatggagcctccaatcccaaagagagagttgaggtctgatagccaaaccaagaagaaggtcccagcaattaataaaatggtattcatgaaaatagcgagactagcattaacccctgaaacgataggtaaattcaaggatactgccaaagattgaacaatggcaatccctagggctaaatacattcgtctacggtcctgaatctcgacgggaaggtttttcaagcccattttcttagagaaagaaaacatctgccagagaatcatggccgacatccagggcgacaagcccactgaaaatagagacatggacctgaggttcccccccatcatggcactagagaaagccaaggaacctatggctcccccaaagatatttgcatttttcaaatccacaaacggtagaaccaattgatttcccaaacaataaataaagaggaaaaagagggtccataagacacgtttggtgattatcgattgactaatttttttcactattactcctattccctgcccatagacaggctgatgttatttcgattgaaacgagacagaaacgccatttcagcctacttatccaagcaaaggattacaagctcttcttgcgcatttggcgaatggtctcagccatctctttccaacgatctcttgagtaggtttgttggttatgcttggttgacttaaggtcctcgaaccctaaaatcggtttgttttcaaacctaaaggcatcaagaatttccactacttttcttcctggattgatatctagaagcaagtcactggtacgcaacaattccaaatctagcccatttaagcccgcaatggctgagtaaaccgtcacatttggataggtaatcaattgggccagtttatctgtcacatgctgtcgagaggcaattttaaactgtaccttaggaagagccgagataaggtccgtcaaatgcggaatttctgaaatgttggtgtaaaccaaacaagtaaatggacggcccttaggataaatcatgtcctctgaaagtggcaataaagcggcattttcagcaacctctgaccaatccatttgagcatagaaccaccagacctcgcgataagcttggcaagccaatggtaaccaaggcttacgatgtgaggcataatgcacaaccttaggatagtcttgaccatttggcagatggaaaccagctaaactagacttggtaaccgcatagttgttgtcaaaagacaagggcaaccagttgttacggaagaccatgtttagaatggattgctccgcaaatgggaccttgtcatgccattcactagtcatgtcgattaggtggcgtctcatgttgtactgcttccaataagtcgtatcaatcaccatgaagccagcatcaaacatcgcttggcgatcctgaatctgaatagcataatcacgcacggcagccaaaggtcgaccttgcaaatcaagggtaaagaggtcctctagagaacctgtaaccaccatgtcactatccaaataaagggcctgttcctcagatacaaagtccgccacaaaatagcgaagatagcttgcatagttgctattagtcttgtattgcttgatatgactactatccacacgacagttaatcacttcactaccaaaggcagccagatgacggtttagtcctctaaaccactcttgagagaaatcatcgttaatcaagtaaaaacgaatgttgcgatgatggaaaacgatggatttgatggtcgtaagcacttggtcaacataaatatagttagccgcaagaacaatagcacgctttttagtctcataacgttgaggagctaaactcaagacctggaatttctcctgaatggagcggtaggcatcagaatccgtgagaccttgctcctccacatttttcaagcaagcctctagcatctgacgataggtaaccatgtatttttccagagggaaaccatggctagcaacaatagccaagcgttcctccatggcataaaccaaagtcatcatccaatcttgcatccaagtcgctgatggcatctctggactctcacggtaaacataaagccccttgttgagataaaccgtacgctcactcatgagataggccttaaggttgaaaaagccatcctcccctgcatgctcttttggaaaaagcaagtcattaaacaaggaacgtttgtagagtttgcctgtcgcagagatcagagcgatgttaatgttattgctttcttcaaagagcccatcaataatctgagcgggtgaataaacctgctcataataatcttcatccttgatataaaaataaaagagatcttccgattccttatagacactgtaattggccactgcgatatccgccttgtgggcctgaagagtcttataaagctcctctagataggttagctctacccaatcctcagcatccacataggtgacgtaagctcccttagcctgacgaataccaatatggcgagcatctgaaagccctccattatcctttttaaaatagaggatacgagaatccctagcagcataactacggcaaatggcatcactattatctattgagccataattgatgagaataatttcaagattttgataggtctgacccaaaacactgtctaaacaggtctggagttgattttctacattgtaaacgggaataattacggaaattttttctgtcattttttatttcttattttttctagctaatacatttttttattttcctgtctcaaactttcataagataacaaggaacagtctaagaatctgacaagcattttacggtcacaagatataaagatcgtaaacacattctatacactttttccttgattttatcgagacttaaccatattaaattataacatagtatcacttaattttctaatagattaacttttttatgagggatttttttcaaataaatttccttttattttcaaaaaaactgatagttaggaagattgaaataagtggatagaaaaagagatagctccgatgagaaactatctcttagaataattaaaacgttttgacgagagttcttaaccccttgatttctcttaccctttgtccacaatcttaatacggctactgccatcatgcgacttgatgatagctaattgttgggcgatgccttctttcatgtcgtccacgtgactgatgacaccgaccatacggttttcaccgatttgttccagaacagcgatggctttggtcagggcttccttatccagtgagccaaacccttcgtcgatgaagagagcttcaacaacagcacccttgctggtattttgcaccacctctgagagggatagggcaatggccagtgcggcgataaaggtttctcctccagacaaggatttgacggaacgctcgctacctgtcagctggtcatagacgttgatgtccaaaccaaagtgatcacgcgcccgacgtccttcttcactcaggataaaggaatagcgattatccgttaagagaccgatgtagttggcattggcatagtccaagatttgttggaaatactgacggataacatagacttcaagattgagtcgtccagttagtgctgtattttctcccttaaccaccttaaccagatcactgagctcttggtgggccttgaaggcctcttggttactgtcttgaagggttttggccgcttggtatgtagccgtcgcatccttaagcccctgctccaggacagaaacctgagccagctgcttatcatagctctcctgacaatcctctactgcttgtgttagattgccaaggtccggcttttcttggtctttgataagctcttgacccttgacaatctgcgccttcaactcttgtttaagagtttggtagcttgtcaattgagcctggagctcagggatcgcttgtttgttcacctcaagaagccaaagctggatttgctctaggtcattggtgagggccccttcagccataagactttggtctagttcagccgataaacgcttagtttcttggctagcattttctttagacttggttaggctctcaagttgccccttgatgccttgaatgtcagcatgaagttggttgtaggcttcactattttccttgacttgcttattgttaaggtccaactcttgctttgctagggaaatacgttcttgataaacctcaacagattcaagctcttgatgagcttcttgtaactccttaagacgttccttagcttggtcaagcgccgctttagcttcttgataggctttagccaaatctatcgatttttcctgagccttggctaactcatcttgataatggagacgatctgcctcttccttatcaaagcgtttgtgtagctcttgataatactgttcaacctttcggagtaaggtttgtccacagtctgcttcatagtcctcagcaaaatcaaaatcaaattgtcccttaacttgcttttttagttcttgatagtgtttttcgagagttagcttgactttagctacttggtcaagcaaatcttgacgtttagattcaacctcactcaaggtagcctgacgatttgacaaggtagccacttgcctttctttttgagcttgaagttcctccacctgattcatgagatccttcaaggctgcttcattcgcctttgtcccatcgaccttaggatggtcaatggaaccacagaccatacatggctgaccgtcctctaattctgcttgcagttgggcaatcatgagttgccggcgtgaagctaaagtcgttcttaacttcgcttccaattccttgaggatttcttgagcctggtcaatctccaaagacagggcttgacgacgtttttcagtcttttctaattcctgatttagttcctctttttccttaagatcttgtgccagttgtttttccacactgtagcccacaatctggaggagtttttcgacttcatgtaagctatctaaactaagacgattagcctccaattctgacaaggactggttgaggagctcaatttttttcgacgcctgttgataggtttcttccaactgcttgtagttagtgcttgaacgtttgattttctcctgctcttgagcaagactctgagcatagataatatcctctttccaagtttcaagctcctcttccttttgaagaaaatccttagattgagctgcgagtgactctttttgagccttaacttcctcaaaagcctgctgcttttcactcaattcttcctgagcgatttcaagatcctgctctaattgcaacaactgtttctgatattgtttaaggctactaatagtttcttgcaacccttgggcaaactgcaattcctccagatgcgcttttgcctctgcctgttcctgggcaccttcctcaatttccagacggtaacgctccttggcttgcttcaattcttggaaaatctttgccaaatcttgggcagtttgcaagctcttctgcagttttgccaaatcctcatgggcatccttcaagatgcttttttgctctgtaagactttcttgacgctgagacaaaagctcttcaaggcgtgccaatttttcagaagctggcgtttgggtcaagactgctaattcctcctcagaccagacctgactggcaaaatggccatccagctgagcttggcgcttatccatatccttattgctctgacgaagacgctcttccaagctcttttgaaaacggtcaaaaatacccgttccaaagattttcttcaaaatttgagtcttggtcttagaatcttctttcaagaaacggctaaaatcattttgcggaaggaggataatctgcttaaactgctcggcattgagccccaaaatctgctcaatctggtcactcacttccttgatcttatccccaagcttttcaatttcctgaccaccaatcttatccacaatgactaaagaagccgtcgccttctgcatggtagtgcctccacctcgcttggctctctcctgctggagcactcgctcaatgcgataaagatgcttgccttgttggaaataaaagattaccttggtcaagtcatcctctggaccagcaaaggttgacctcatctcttcaacattacgatcaccactggttgtggcaaacaaggcaaccgtcatggcatcaaagagggtactcttaccagcccccgtgtccccaccaatcaaaaagaggggagcgtggtcaaactgggtgaaattgatgacttccttacgataaggcccaaaattggtcaattctaactgaactggtctcattgtccactccttccaatctcctcaaaaatactttccacaagggcagtttgtctctcagacaagacatcgcccccagtcactgtctggtaaaaatcagagacaatttcctgaggcgactgcatttccaaatcttttaagtgctgatctacagtcaagctttcttccctgacatcacccaaacgactgaaagtgatttctacaatgtctgtcccataaatctcttcaagacgggcacgcacattgatgccctctaattcctttcgactggacaattgaatatcaaaggcaaaccaagccttttgacaaggttgtcccttataaaattcgggtgacatcaaggtttcaaaaggctcctgcaaggccaaaatcggtcgtttgacctctagaggatggaaggtctgagacaagtctccagttgcatctaagtcaagaatataaatgcctttttcttccttacgcttggcttctttgacattaaaggcgaccggactgcctgaatattgcacgcgctgagtcggactggcaaagcgcgtatggatatgccccaaggccacataatcgaaagccttgaaaaggtcactggtcacattggaaagaccacctaccgtattgctagtttcagacaacatcaattctcttagactttgaccatcgctatcatccttcttagaaactgcaaaatgcgccaccaaaatatgggccttgtcaggatcaaaagctttttccatatcctcgagaatataggccaaggcatcaccaatcccctgaatttccttattctcatcgtccttataataaatacgggcatcaatagggtcaataaagggaagcaggaaaatctggcaaccatccaactcaataggctcaaaagcctcctccaaacgtgtgcttaaatgaagaccttgatgttgaaaaaagtctcgtccaaaatgcaaacgttcagcaccatcgtggttgccactgatagcatagacaggaatctgctcctccaacaccaagcaggccaaggtcttattaaatagcttaatcgcatccacagggggtaccgcacggtcatagaggtctcccgcaatgataaccccatccactttttcgctaatagccaaatccacaatctgttgaaaggcccactcctgctcctccaacaaagaccagccattgagggttcgccccacatgccaatctgacgtatgtaaaaacttcatgacagtctcctcattcgttttgtcttactctattgtaccttatcaagctaaatactgcttaaaagattcacaaaccttgggagattccgtgaattttatccgcagaccaaaaaatctctccgagcaattcactcgagagagattttatttttggattttatgagagataaggtttagaaatcttagtcttggtttttacgacgattcatagccgcaagtcctgacatgagtcccatgacaacaacacccattgctgcaaggttgttatctgactcacctgttactggcaattgttcatcgccttctttagctttatcagaaccatctgccttcttaccatttttatttccagatttcttcttatctgaacctttaccgtctgaagcgccatcagctgctgatccagatccagaacccttagatcctttagaaccgtttgaagttgcttttacagctttagaagttgagcttccagattgaccaccattgccatttgaaggtgttgagccatcttcaaccttacggtagatgtaagttacgactgtttgaccttctgtcatcttgtctgtagatttaccttcttgacggatcaattcatatttcacaccgttacggtagatgtaacggtcaccatgaacattaacttctgaaccaacagagttagtgatcacaagtggcatcttgatttggttaccatactcgtcacggtagattacaacgatagtaccaacttctttgttaactactggtttagcaggttctgcattaaccaccttgtaaacaacctttgtatcttcaccagggttgcttggtgtcacaccagtcttatcagccttgtaacctttcacttcaggaacaagtgtcatagcagccttagttggatcgttaggatcatttgtgtaagaaacggcttcaacacctgggattggattacctttttcatcaacggcaataatcttaccgaatttagtgtaagtaacagtctcaaccttgctgtccatagtgacatcttgagaagccacacgacctttatctgcgaagtaaccgtttaccattggtgtaatcacgagatcaaacttagtcttatctgccttccattcacctgcagtaagaatatcacctgttacagagtcaagagtcaatgaacgtttccattgtgctttctgaacactgtctgctggcaatttagcattgctatctttgcttgcatagtgaacagtatatgtcacatctttaaggtaagcatccttagctggccattttggaccgtttggttggttaggatagattggtgttcctggttcgtgagcattgtctggattaaagtcaagtgctacacgtttgaagcttactgtccaagcttggtcaactgtgctatccaagtcaaagcttgcaccagctgggtaaccatctgttacaaggacatagccaaggtcttgatagtgtttgatacgttcagctgttgaatagttaaccgcttcaccagacttaccagccaaagcaacagtttcaagggttgaaccacttgtttcatcacggtaaacaacacttgctttttgatcgttcttaacgtaaacaaccttagtattgctagacaagtcacctggtgttgcaggtactaccttagcagtgtaacctgggataattggcaagttcttgtcaactgcaatcatcttagttggatcgttaggatcattgatgtaggcagtatctgacacacctgcaattgggttaccattttcatcgacaatgacaaatttaccaaaggccttataagttacggtgtcagttgcttctggagcatctggagttactgtcttaccacctgctaccgctttatcggcaaagtagccattaacaacaggaaccttaactgtaccgtaagtgtggctagtttcattccaagtcaccttaccagtcgcttggttatccttacctgcaaaggtatagtcagatttcacatctgcagctggagttttatcgccagcaccttggaatgtaactgtttgtttcgtcgccttagtcacatcgttaacgattgctacgtaaacgacacgagtgtcttcacctggatttgatggtgatgcagggataaccttaacagtgtaaccaggaatacttggaagcgtcttgtcaatggcaatcatcttagtcgcatcattaggatcgttagtgtaggcagttgttgatacacctggaattggatttccattttcatccacagcgataaatttaccaaaggctttgtatgtcactgtgtctgtcgcatttggtgcatctggagtaactgtcttgccacctgctacggctttatcggcatagtaaccagtaacaactggagttttgactgttccataagtgtgagtcgtttcagtccaagttgttgtattagttgtaggatcttctttaccgttgaagctaaagtcattttgagtgttagcagctggtgtcttcgtatcagcaccagtgtaagttactgtttgacttgttgcttttgtgacatctctagtgtctttttcaacgataatgtggtaacggtaacctggagctagatattgaccaccaccattggcatcaattgaagcatccaatccttgtgaaccgttagcgaattgcacaaggtcaacgacacggctttgattacggtcccaagtacgttctgaacggattgttgcaataccgttgttatagtcgtattgacgttctgacttcaaaacatctacataagcattagctttagatttgtcagcagaggcatatttgatgcggtatcctgctggtactggtggaagttctgttacaccagcatcataaattttattgtaagtcttaccgtttgctgtaattgtttcagttgagttattgatacggtaggttgaagatccaggaatcttgtttcctgcttcatcaacatagtcaataataccaaggttggcatagtttacgacaaccatgtagttaccatttgtaatgtagtcataaggtctcataaccccacgattatcacgaccaactctaagattgttgatgtaatcaatgttaacaaagtattgttgacgttctggcaaataggcaagtttatagccgaggtttgtcaagtcagggtttgttgaacttgctccagcatttgtcaaaacagcaaccgcatcagctgtacgaagactacggtttgataccgcaagtcccatagcattgatgagattttcagagttaaggcttgcttcagcagcattcaattcactgcttgtcacggccaactcactagtcgctactttaagaacgctatttacagcattggttgtagactctgcgctggcagtttctgctgcagtagcaactgaagcagccgcacttgtttgtgctgatacttgaccagcaacaggagcttcggctactgctgttgagctaagagcttgtgcactagtcgctacagatgaagcagtcgctgctgcagattcagagctcgcttgcgatgtagcctgagaagctgcttctgaactagctgctgtttgactagttgttgaagttgcctggctttcttgagttgctgattgtggctgttcactagccaaggccacagtagagactgagcttggtgcgttttctgttgttgctggcgctactgatgctgtcgttggtgttgattgctccacgactacatctggctcagcagttgtttccatacctgcggtagttggtgctaccgtttcatcagcttgggcaccctgtgcatttgagaagattgaaactcccaaaagaacagaggctacaccaaagctgtattttcttaatgaaaaacgttggcgtttgttaaacatatctctcataataataaatttcctcaatatccaaattactttatatacagtttccattttatactataattattaaattgtcaaatatataatgattattgttctaaagtttaactttcattagagaatattaatttaaaacttttatctaagtcctttgaaacatcaaaacgttcgtgcttttatttaccacaatcctcagttttgttagttctataattttcaaaatactttcatatcaaaccatttttcattaaaaacgttcatcaccctaaccttattttttagttttggtgatatttattaaaatacaaaatactctcccttcaaaaagaaaaattttttaacgactcaactcacagttctctcaaccccttgccaatactgacatagagactccttactactcctttttcgaacaaactcaaaaatccctttggcatttaccaaaagggattttttcatctattatttgaaaatagaacttgtgaaactatctgtctcttgtaggagtttcttatagacagcttctttgagttttgttgtatggcttgtagatacagatttattgccattattatctgttttaagacttgcagcgtctttggctactgcagctttaaacaaggctaacaaatcatcgtaagagcttacagatgtgccatcaatagtaactgtcgtcaaaccatgggacgctttttctttcacttctttgaagtaggccttcttgaagtcttctaatgagttgaacttcccatcagaaatcttgttaataataaagtcatccccaagggtgttcttaccagccgctttggcttcttgtttatacttgttggtcgcataacctaggaagcctttttcatagccgtagtatccccagagtctgaaagtattatgcttgaaggacatagcgcctggagagccctcactggtattaccaccataaatggcagacatcataggcacattgacataggcagaagagaaatcctcaggtttataaacaccatttccaggtccacgattggtcatgaagttattatccacaaggtcatcaatagaagtcaagctaatagctttttcgctatcacttagagcacgcaccttgtcgtattggtttttactgttacctcgtagctgtttatctaccttcttgaaccatgcgttattgagctcttgcttgccttggctgaggaccgcttccccttcaagggagtcaagaagcataagggtatcgttgtagcccttcatgtaacggtcgatggcttcacgcgagttcaacttgtttggattagtgttgtaccactgattaccgtcgttttctctttcaaaggccatgttaagtcccaaggccccgtattcaccttgatggccctgtgtagctggtgattgcaacatcccttgggcataagcttcaacgtctgttccttcacgacgaccaaagcctccaaagtaggcaatacggtcattgatatgagttgtttcatgggtaaaggctgaagcaccgtactcgctaatcatgttagacatgacgaaggtaaccttggcacgattatcgtatggattgtcgtagatggcagcataggcaccggccatggctccgttatcaccatagtactcaccgactggtccatagatttcacggattggcgcatagacttctgtactgttcttgaattggccgtagcgctctggccaacctggccaaccatgaccccagacgtagaaaccttcccagactggattgacaatgtctttgaacaatttgtttttgacattatccgcagccaatctttgccagaaatcaagatagttgatttgacgttgagcggctagatcaatctcaggtttcaacttctctaaggttgtattgtacttgttagccgtaccataagacatggtgtcataggtagaaatcaagaacatctctgtcttatcaaggttcaacaatggcaaaatcatcttgcggtggagaccacgactaaggttatcataaacacgatacttgtgctcaccgacaccttcattttgagatgccttctcaacaacgtagaccttatccttagcagcatcgatgaaccaatcattcatattgtcgatagtggtaaagagttttcggttgtaattaaggaagtcggtcagatcactagaaagggtacttttggcgagaacttcaccaaaagcatcgtatgttcttgaaccactgatattattttccttagagccaatctcaatcaaacggtcaaggacatccacatttttaccatagaaatctggtttgaagagcatgatttccttgatattaacatcatcaaacttcacaccatagtagcgattcaagtaagtcaaacctaacaagagggccgctttatttttctcaaccttgtcaagaatcatttgttgggcagctggtgattggttaagctggtggtcttcattttgaaccagcttagtcaccaggttagttaaattagccttaacagcttcaaaactttcttccaagaagaggttcttgatagcattgaccttgtttggaccggtacgaccaagtttttggtaaatcggatcagactgcaactcaatcggtttcaggatatcaacaataccattgataagacttgagtggtctttttgaacgatattcggagtgtacttgatacccaaatcaataacagtgtactccttaacgttgctcaaaccttctgcactctctgaaagcttgaagtagtctttgcttccatcagcatagtgaacaataatcttgttagcatcgcttaggtctgtgacaaagttactgtctttcattggtgtcactgagagcacatctttagtattcaagttgtggcctttggccagtttatttgcttgatagacaatataatccttgttatagaatggctggaatttctcaatattcttgtaagcctgcttgtattctggcttatagtcttgaatattggcaaaatcagcttgactagaaacattgttaagcgtattcaacgcgtaaggctcgctaacaaatgtatcagctgtaatcttgtaaccttcaacacgcttgtcagcttcttccttggtcaaatgtttgagcttattcggactcttagtatctttaccagtaccatcttcggccgagctatagccgataacgccaaagaggtctttgatgtatgggccaccgtcttcatcattgacatcgttagaagcaaaaatttcttgacctttaataaccttagcataggtcacattattttgaacagcgccgtaaggccacgtcttagcgacaataccaccgacatttcttgtgtttttaacatcaagaacacctttagctactgaattggttaccttagccttcgttcctgatttccaactgttgagcatgtaagtgacaaatggcaccaacatacttgcgttggcattttgagctgtaatggtcgcatccacataggctctgttgacgaatcccatgtagtttgaaccagcaatcccaccaactgttgagttattaccaacagagttgattttaccgataaaggcaacattttcaatcttgccatcttcatcaatcttattgacaatacctgcaacgtcattgttaccagtcactgaaccagccaccttaacatcttcaatcagtcctttgtttttaaggttaaatccaactgttgctatttgattctgaccagaacgatcgatgtctacattttcaaagttgatattcttgattgttccgccattgatgacattaaacaatggatgctctaaatcatagatggcatagcgtttgtcaccatcactgagcaacttaccagtaaattcggtcgtaatgtatgatttaccgtttggaacgacgtgacgagcactcatactttggccaagtctaaattcacctgatggattcgcttgaatggcattgaccaagtcagcaaaatcgtagtaaacattggcttggctagcctgaggtttctcaatgtaatagctataggtttgagcaaaatggttttgggcatcacgttgaaccaaattgtccgctgctgcagttaccttataaactgccttgccatcaaccgttgtttcttcgatggcttttactgccaagtaagtggccttctgatccgcagaagtcatcttcaagtagtaattcgtgagatcctgaggtacagctgccagacgagtctcatccacttctgtttgattgtcatacttaatcaaatctgtacgtgcaaaatctttaagctcaaccttcttgagatccagttggagagtttggtctgccaaaacctgattctcctcaccattgccacgatcataggtcatggttgttgcgagggtatatggcttgtaatagtctaagtttgttaggtcagcagtcaaggtcgtgctaggaatatcaagcgtttggacaatctgtccgttttgcttgaggaccgctttaatagtcgtgatagctgctgaacctggattcgtcaagttgtagctaagtttagcactacgacccaaatcatccttgtcaatctgtgtcagcgtaagcactggtttttcagacaccttggtccctttgtgaacgatacgatcttgaacaggaactagcacggtttcagtgacagttggtgcctcagacgtcttattccctttataggtcttatagactttggtgattttgttttgacctttttgaccttcttgaacaacctttagagtgcccttttcaagactatcatcttcttggacaatctctttaaatggaagctctacaatagactcttccgtcgttgttccatctagaggcttgctgccacgacgaagctttctaggttgtggcacctcgataaccttacctgatacaatagttggctcaccaaccttgacaccatcaatggtttggtaaattttctggatttcttggctacctttttgaccttcttgctcgacaacctcttcatccacatacttgctatcatcagtgataacttcgataggataatcgatggcttgcgtttcagtctctgtgacacttccaacaactggagtgtggacaggattctcgggttggaccagagcctcaccttcgtgaccggattcttgtgtacccttagcttccagtttaccagtatagtctggattagcaggttgaacagctgcttcgccttcatggccaacttcttgagtacccttggcttccagtttgtcagtatagtctggatttgcaggttgaacagctgcttcgccttcatggccaacttcttgggtaccattggcactgattggaccggtgtactctgggttagctggttgaaccactgcctcgccttcgtgcccaacttcttgggtaccgttagcactgatcggtccagtgtactctggattagctggttgaacccatgcttcaccctcgtgaccaacttcttgggtaccgttagcactgattggtccagtgtactctggattagccggttggacccatgcttcaccctcgtgaccaacttcttgggtaccgttagcactgattggaccggtgtactctggagcgacaggttgaacagctgcttcgccttcgtgtccaacttcttgggtaccattagcactgattggaccggtatacgctggattggcgggctgaactagagcttcgccttcgtgacctacttcttgggtaccattagcactgattggaccggtatacgctggattggcgggctgaactagagcttcgccttcgtgtccaacttcttgggtaccattggcactaatcggtccagtgtaatctggatttgcgggttgaacagttgcctcgccttcatgaccagattcttgcgtacctttagcgctaattggaccagtgtactctgggttagcaggttgaactagagcttcgccctcatgacctgactcctgactaccttttttccaactgattcccttactatccttatcagctgtcccctgactaactgtattatcttcttttattgaagactcaagcccttgcaaagtattctccaaaggttgttcaagctccggcttagcagagtaacgcagataacccacatactcataaccatcaatggcaataacacccttagccaaatcttctttatttgaaaccgcaagagtttgattataggcctgcaactccttgttttgcaaggcaagcacctctatcggcacaaggagactttgccctgcggccccaatcaagaccaagccaataatttttttacgatgtttttttgaaaatagcaacacagccatagtcgctgttgccaatcccaaacctgtcgctgcccagtcagaacttcctgtctgaggaagagtagcttgactgtctcccttacgtttataaaccagataaaaagtgtcctcattttgatattccttaggaatagcatgtaccacttgcttctgctcttcagctgttaattcattttctgtgacataggccatgtgtaccgatgcatccgaagtaacctggtctgccgaaactggtttagacacgaaaagaccacctgctaacaagaatgtcccgatagcaactggccctacacctactgacaatttacgaatggcgtattttgtcactttttcaaaaacatgatttgcttgtttcattcaaaatcttcctatatgttaatccttgtaccccaaggcacgtcaaaaaaacgaagacgttattgaaaaacacgcactccatacatttattaaccttcttccgaagtctatcatatcctttttttaatctttaagcaagcattttctctaatttttaatcaatataaaaaacgaattatgattagtaactagatcctcgtgaaaataatcaaaccttttcatataaataattccaaagactctaacatttgtaagaatattcttttgatattcaaacaagtgatatattttgagttaaataattttataaattatactaagatccccatatatctaacattttaattgaaaagataaataaaaactactaattttaataaaaaaaaatgcaagaacttctctcgcatttttttcgcattaatattccagagattacccattaccttgagaaatactatatggataatctagttaataaagagtttaccataatataatctaaatatcaatcgttacataatctcattctatatatctttcgtgtatgaaagaaatatttagtctcttaaattaaacacctatatattttcaaaacataaaatattaaattgtaaccatgcattgacgctccctgaaatctcctcaattataaattaattagtcttaaactagattatattttcctataatatagtctgaaaatccatctcaacatatcagaaaatattatttttataaaacttgttgtaaaattctaattttactgctataatcacgttagtagactcatatttaaatgaatttatcttcccctcgtctctaattaacttctatcatagagacttcacatttagcttctaactaacatattactcttgtatgagctactattttaaagaagctctttgtcaactgtagtgggtgacgaaaagctaacatctagagaggaccggataggtcttctctttttgtatattcagagtgatgaagacacgcttcttaaagttgacaaagtttcttaagtcaaatcccaactgtttgatgtctttaatcaacttattagtcgcttcaagtttcgcgtttgaatagtctgtttctagtgcgttttatttgaaaaaacatcaaaaatagcgcaaaaaactcttcttgtgctatactgtaattgagattttttaaatttttggtgttagaactgttacctcagtcctagcactttttctttgtcgtattcttggtgtgttgcgagaattttgtaaatgatacgaagcagcttatgtgcgcaagcaatgacggctttcatcttacttcctctttgggaaattttgctataaaaagatgaaaacgcattgtctttagagtgagccgcaatcaatcccgacatggtcaaagcctacttgatatatcgatttccttgcgtgatgtgtaaggattttttaatgccagcactttcataagaccctggacagagcccagcccaagaagctaagtgtacgtccgattgaaaggcctttacatctggtccaatctcagctaaaatagtgactgcagttgtaagaggttatgaatctcattctttatgatacaggctaggcaaagctctattaaagacaacggattggtattgttcaccttcattataagcagaactttcttttctgtcatgagttagcaggctaagcttgcttagagttttttgatgtatggtttgtgtctaaggaaggtcctaaagacagttttaaagtaatgattgaccttgcttatattctcctctatgagttcaaaaaactcatcccccctcttctcctgaaagtgaaacagcaacagctgatagaggttataataattagcgagttcttctgaaaagtctagtgtctccctaacgacttcatgtggacttaaggtttgaccaaaggtcttcgagtgaaatgatttacaagataacttacggctgtccttttggaagagtcgccagtgatttttcaaggctcggtaggggagtgatttcttatcaaactggttcataatggcaattcttgtctttaaaaaggctcgaccaaggtgctggatgatgtggaaacgatcaataatgatttcggcgtttgggaaaagtctgcgagctagtgggatataggctcctgacatatccattgtaataaactgtaccttttgtcgaactttcaatgggtacttcaaaaagtagtttctaatcttggtttgacggcgattatcaaggttggttatgaatttgttggtctcatagttttgcgccacaaaagcgagttctcctttcttgaacccaaactcatcccaggacataacatcagggagtttgtcataatgctccttgaaagtaaactgatcaagcttacgatagacagtggacgtcgacacacgaagtcttctggcaatatctgttagtgataccttcccagtaaggagttgtgtagctttttgccggacaaggttggagatttggtgatttttctcaacaattgatgtctcagctaccgtgacgcgatgacagcttttacattggaagcgacgtttcttcagacatagtagtgttggagttccagcttgctcgagaagagggattttagaggttttttgaaagtcatatttgatcatcattccatggcagtgagggcatgatggtgcaggataatcaagttttgcttgaatctcgatgtaggtatcttttttaaacacaagagaaataatgatgttgagtctttaatttcgattaattctatggtattcttaataagtctcataagttcttcctaatgatggttttgtcgcttttcattatagttcttatgagactttttgtgtacactcaaaaagctccataatctctacagtgatttcacccactacagaaattatagagccatgatttcccaaaccactagtacaactagtcgctttcaagagaccaaaagactcaccccagttttgggatgagtcttttcttttgaaaactcagatgacttgataaatcacttctacaagttctttaatttatcttagtcttcttttttgcgtttacctgccaaggtaagtccaaatgtcgcaagaattcctccgagtaccacagctgtcgttgatgcttcttctcctgtcgctggaagggtagaagtatctttttgagctgctgaaatagtcgctcttgctttgagattcatgtgcttatctgatgaatccactgcctgaacatctacaactggtgatggtttcgcagtcgtttgggcaacatcagaacctttaccattattaaaggtatctgttgatccaccccttgttgcaagcattggggcgctagcttctgagacattacctgctaggtctgtcgctttcgctgtcacattaccttctggaaggtcaacagttggagtaatagtagctttaccattttcatcagctgtggcttcaccaatcttgttgccatctttatcgtagagggcaactgttgatcctggttccgcaataacatcgattggtgtacgagtacctgccttacctgtaaggtcagtgttcacaaccggtgctgacggagcagtcgtatcaattcctttacctacagtcactgatgttgggcgagaggtgttgcctgcttcatctgttgcagtcacagatactgtagcaccttcgttcaaaccacttactggaacgctgaagttaccttctttgtcggccttcgctgatactttagagccatctggaagagtaacttctacggttgaaccggcttcggctgtacctgttaccgcagtatcgcctgctttaactgtgttcacaactggcgctgttggtgctgtcgtatcacctgctttcgctacagtcgcagttgtcgcatctgacttgttaccagcttcgtctgtcgctgtcacagaaactctgtccccttcgttcaagccacttactggaacgctgaagttaccatcttggtcagcagttgcagttgctttagtgccatctggaagtgtgacttcgacggttgaaccggcttcggctgtacctgttattgctgtgtcgccagccttaactgggttcacaactggcgctgctggagctgtggtatctgtcgcaacttttggttcacttgcgtctgatgtatttcctgatgggtctgtcgctgtcgctgttacgccacctactggaatatcaaccgttggagtgattgttgctttaccattttcatcagctgttgcttcaccaatcttgttgccatctttatcgtagagggctactgttgagcctggttctgcagtcacttcaactgggtctttagttcctgctttacctgttagatctgtcttaacttctggtttcgctggagctgtggtatctgtcgcaacttttggttcacttgcgtctgatgtatttcctgatgggtctgtcgctgtcgctgttacgccacctactggaatatcaaccgttggcgtgattgttgctttaccattttcatcagctgttgcttcaccaatcttgttgccatctttatcgtagagggctactgttgagcctggttctgcactgacttcaactggatctttagttcctgctttacctgttagatctgtcttaacttctggtttcgctggagctgtggtatctgtcgcaacttttggttcacttgcgtctgatgtatttcctgatgggtctgtcgctgtcgctgttacgccacctactggaatatcaaccgttggcgtgattgttgctttaccattttcatcagctgttgcttcaccaatcttgttgccatctttatcgtagagggctactgttgagcctggttctgcagtcacttcaactgggtctttagttcctgctttacctgttagatctgtcttaacttctggtttcgctggagctgtggtgtctgtcgcaacttttggttcacttgcgtctgatgtttgaccatctttcgtagctttcgctgttacgccacctactggaatatcaaccgttggagtgattgttgctttaccattttcatcagctgttgcttcaccaatcttgttgccatctttatcgtagagggctactgttgagcctggttctgcagtcacttcaactgggtctttagttcctgctttacctgttagatctgtcttaacttctggtttcgctggagctgtggtgtctgtcgcaacttttggttcacttgcgtctgatgtatttcctgatgggtctgtcgctgtcgctgttacgccacctactggaatatcaaccgttggagtgattgttgctttaccattttcatcagctgttgcttcaccaatcttgttgccatctttatcgtagagggctactgttgagcctggttctgcagtcacttcaactgggtctttagttcctgctttacctgttagatctgtcttaacttctggtttcgctggagctgtggtatctgtcgcaacttttggttcacttgcgtctgatgtatttcctgatgggtctgtcgctgtcgctgttacgccacctactggaatatcaaccgttggcgtgattgttgctttaccattttcatcagctgttgcttcaccaatcttgttgccatctttatcgtagagggctactgttgagcctggttctgcactgacttcaactggatctttagttcctgctttacctgttagatctgtcttaacttctggtttcgctggagctgtggtatctgtcgcaacttttggttcacttgcgtctgatgtatttcctgatgggtctgtcgctgtcgctgttacgccacctactggaatatcaaccgttggcgtgattgttgctttaccattttcatcagctgttgcttcaccaatcttgttgccatctttatcgtagagggctactgttgagcctggttctgcagtcacttcaactgggtctttagttcctgctttacctgttagatctgtcttaacttctggtttcgctggagctgtggtgtctgtcgcaacttttggttcacttgcgtctgatgtttgaccatctttcgtagctttcgctgttacgccacctactggaatatcaaccgttggagtgattgttgctttaccattttcatcagctgttgcttcaccaatcttgttgccatctttatcgtagagggctactgttgagcctggttctgcagtcacttcaactgggtctttagttcctgctttacctgttagatctgtcttaacttctggtttcgctggagctgtggtgtctgtcgcaacttttggttcacttgcgtctgatgtttgaccatctttcgtagctttcgctgttacgccacctactggaatatcaaccgttggagtgattgttgctttaccattttcatcagctgttgcttcaccaatcttgttgccatctttatcgtagagggctactgttgagcctggttctgcagtcacttcaactgggtctttagttcctgctttacctgttagatctgtcttaacttctggtttcgctggagctgtggtatctgtcgcaacttttggttcacttgcgtctgatgtatttcctgatgggtctgtcgctgtcgctgttacgccacctactggaatatcaaccgttggcgtgattgttgctttaccattttcatcagctgttgcttcaccaatcttgttgccatctttatcgtagagggctactgttgagcctggttctgcagtcacttcaactgggtctttagttcctgctttacctgttagatctgtcttaacttctggtttcgctggagctgtggtgtctgtcgcaacttttggttcacttgcgtctgatgtttgaccatctttcgtagctttcgctgttacgccacctactggaatatcaaccgttggagtgattgttgctttaccattttcatcagctgttgcttcaccaatcttgttgccatctttatcgtagagggctactgttgagcctggttctgcagtcacttcaactgggtctttagttcctgctttacctgttagatctgtcttaacttctggtttcgctggagctgtggtatctgtcgcaacttttggttcacttgcgtctgatgtttgaccatctttcgtagctgtcgctgtcacattacctactggaatatcaaccgttggcgtgattgttgctttaccattttcatcagctgttgcttcaccaatcttgttgccatctttatcgtagagggctactgttgagcctggttctgcactgacttcaactggatctttagttcctgctttacctgttagatctgtcttaacttctggtttcgctggagctgtggtatctgtcgcaacttttggttcacttgcgtctgatgtatttcctgatgggtctgtcgctgtcgctgttacgccacctactggaatatcaaccgttggcgtgattgttgctttaccattttcatcagctgttgcttcaccaatcttgttgccatctttatcgtagagggctactgttgagcctggttctgcagtcacttcaactgggtctttagttcctgctttacctgttagatctgtcttaacttctggtttcgctggagctgtggtgtctgtcgcaacttttggttcacttgcgtctgatgtatttcctgatgggtctgtcgctgtcgctgtcacattacctactggaatatctttcgttggagtgatagttgctacaccttggtcgttagctacgcctgttccaagactgttgccgtctttgtcgaacaactcaacggttgagcctggttctgcagtcacttcaactgggtctttagttcctgctttacctgttagatctgtcttaacttctggtttcgctggagccgttgtatctgtcgcaacttttggttcacttgcgtctgatgtatttcctgatgggtctgtcgctgtcgctgtcacattacctactggaatatcaaccgttggcgtgattgttgctttaccattttcatcagctgttgcttcaccaatcttgttgccatctttatcgtagagggctactgttgagcctggttctgcactgacttcaactggatctttagttcctgctttacctgttagatctgtcttaacttctggtttcgctggagctgtggtatctgtcgcaacttttggttcacttgcgtctgatgtatttcctgatgggtctgtcgctgtcgctgtcacattacctactggaatatctttcgttggagtgatagttgctacaccttggtcgttagctacgcctgttccaagactgttgccgtctttgtcgaacaactcaacggttgagcctggttctgcagtcacttcaactgggtctttagttcctgctttacctgttagatctgtcttaacttctggtttcgctggagctgtggtatctgtcgcaacttttggttcacttgcgtctgatgtatttcctgatgggtctgtcgctgtcgctgtcacattacctactggaatatctttcgttggagtgatagttgctacaccttggtcgttagctacgcctgttccaagactgttgccgtctttgtcgaacaactcaacggttgagcctggttctgcagtcacttcaactgggtctttagttcctgctttacctgttagatctgtcttaacttctggtttcgctggagctgtggtatctgtcgcaacttttggttcacttgcgtctgatgtatttcctgatgggtctgtcgctgtcgctgtcacattacctactggaatatctttcgttggagtgatagttgctacaccttggtcgttagctacgcctgttccaagactgttgccgtctttgtcgaacaactcaacggttgagcctggttctgcagtcacttcaactgggtctttagttcctgctttacctgttagatctgtcttaacttctggtttcgctggagctgtggtgtctgtcgcaacttttggttcacttgcgtctgatgtttgaccatctttcgtagctttcgctgttacgccacctactggaatatcaaccgttggagtgattgttgctttaccattttcatcagctgttgcttcaccaatcttgttgccatctttatcgtagagggctactgttgagcctggttctgcagtcacttcaactgggtctttagttcctgctttacctgttagatctgtcttaacttctggtttcgctggagctgtggtatctgtcgcaacttttggttcacttgcgtctgatgtatttcctgatgggtctgtcgctgtcgctgttacgccacctactggaatatcaaccgttggcgtgattgttgctttaccattttcatcagctgttgcttcaccaatcttgttgccatctttatcgtagagggctactgttgagcctggttctgcagtcacttcaactgggtctttagttcctgctttacctgttagatctgtcttaacttctggtttcgctggagctgtggtgtctgtcgcaacttttggttcacttgcgtctgatgtttgaccatctttcgtagctttcgctgttacgccacctactggaatatcaaccgttggagtgattgttgctttaccattttcatcagctgttgcttcaccaatcttgttgccatctttatcgtagagggctactgttgagcctggttctgcagtcacttcaactgggtctttagttcctgctttacctgttagatctgtcttaacttctggtttcgctggagctgtggtatctgtcgcaacttttggttcacttgcgtctgatgtttgaccatctttcgtagctttcgctgttacgccacctactggaatatcaaccgttggagtgattgttgctttaccattttcatcagctgttgcttcaccaatcttgttgccatctttatcgtagagggctactgttgagcctggttctgcactgacttcaactggatctttagttcctgctttacctgttagatctgtcttaacttctggtttcgctggagctgtggtatctgtcgcaacttttggttcacttgcgtctgatgtatttcctgatgggtctgtcgctgtcgctgtcacattacctactggaatatctttcgttggagtgatagttgctacaccttggtcgttagctacgcctgttccaagactgttgccgtctttgtcgaacaactcaacggttgagcctggttctgcagtcacttcaactgggtctttagttcctgctttacctgttagatctgtcttaacttctggtttcgctggagccgttgtatctgtcgcaacttttggttcacttgcgtctgatgtatttcctgatgggtctgtcgctgtcgctgtcacattacctactggaatatcaaccgttggcgtgattgttgctttaccattttcatcagctgttgcttcaccaatcttgttgccatctttatcgtagagggctactgttgagcctggttctgcactgacttcaactggatctttagttcctgctttacctgttagatctgtcttaacttctggtttcgctggagctgtggtatctgtcgcaacttttggttcacttgcgtctgatgtatttcctgatgggtctgtcgctgtcgctgtcacattacctactggaatatctttcgttggagtgatagttgctacaccttggtcgttagctacgcctgttccaagactgttgccgtctttgtcgaacaactcaacggttgagcctggttctgcagtcacttcaactgggtctttagttcctgctttacctgttagatctgtcttaacttctggtttcgctggagctgttgtgtctttagttacaaattctgataatggtttcttatctgtagaaccatctgtatatgttactacaagatttccatccgcatctttagtaactgattgaatcttattagttttatcagctacagttgtaccttttttgtctgccaaattagcatcatcattggtttgggagtactcaagttggagcttttctttgattttatttaactcatcatttgttacgttatctggatttgccacctcaactttttcggttggagttgcaacatcatatttttggttttgtggcttaagcacaacacggaatgcacctgggtcagttgcagttgagctacctacggctttattctcaacaagtgcaccatcagtatcagttgcagttgcataacgccatcctagaggcaaaccggctggattctctcctttagttgctgcagttagtctgtcttgtgtcaaaccatctgtcgctgctggtgtacctctataagtaatgactgctggtgcatctgctgttgctggggtttcagtagtgataacatttgctttaaatccatattgagtattgatggtatctgcttcaccagtaacaggatcaaactctctgttacccccttgttttacagtagcacttgcaatttttccgctatcatctttgaatttgatatcgaatgagttttcttccccaccatatacataaacttctttagtatctttattagagtaaggaatctctactgtaggagcctcgttttgacgtgcaggatttacaactacagtaacttcaatctcacctgactctttaccttggctatcaacagctttatacttaactgtataagtgccttgggtatttgtatcaactgtcttagttcccgcgttaccatttactgaaataacttcagcatggaccttatcacctagtgttgcttgagcgtcatcttctttatctgctactgtcacaagagatgcaaggtcaagttgagcaccttgagcaacagttttttggtttccttcaactgctgattcaatagttggtgcttggttttctacaccgcgtggttgccagccagccacacttgagaagccaccttctaccacgtttgagatagctgctacttctgtacctgcaatcttgtcagccattgtaaggacgatcgtatcttggaatttaccgttctcaactgacttgacagttgctgcttctggtttttgtgatgtccatgcagctgagagattgtcacgtttgactggaatttcaactgtttgacctgcagtatttgtatagcgcaagtaagcaatccctgcatcatgaggaaccttaagagtaacctctttttgtcctgctacaactgcatcctggttagtagtcaaacttgaaggttcaaccgttgtctcaccgattgatactggaactgtacgacgactactttctgttccgtcaaccgtttgagtcacctgaacagtttgacgtggtttaatcgttgtaccttcaccctgattgttgttcaaggctgttggaagttcacctgtagtccagttcccactactatcaacagttacattgccgatattctgttcgcgaccatcaatatacagtttaattttagcaccaggaattcctgtccctgaaagagtacttgatgttgaagctactgtctgaacaggaacattgacagaagtatcagttaagtttggagttacgttcggtgtcgcaacctgactaaccaagttcttgtcgtacttacctgagatagcataccagttattccttggtagccctgtcttagattcaactccggcaatataagaaatgacttgtgatgagtcttcaactattgtacggtacttaatagtaaacttgcgagcactagaactattagataattggaggacatataccttttttgtatcccccataacaccgctaagaccatctacattattgtaatcccttccgacagtatttttgacacgccattcaagtttattacctgcgtcaacatactgaacaccttctgcatttgctgaaccagcacctgattctttatttgcatccttccagccatcgcgatctacgtaagcaccatcataatctgtcacaacattataagggtcagatacattctttggaattgtgaaatagtagtatcctcccatcctatcgtactgagcctcgttaaaggttacagtccactctaatactgggcgaccttggccagatggatcagttgcgactgtcttcccatcgactacctcatagtcgtccaactgtctgtattcaatcttagcacgttgagttggagtcccactgtttacttgagcacttcgattttggtaaacatatttaatatctcttccttccatcgaacgttcttgccctactgcacgacgactacgtacacgaggcacatttgccgtttctgacacagtaacattatttgcactagtgctcactgagcttgctgtagtcgacgatgctgtagaagctgtgactgaacgagatgcctctgaagcagttgctggttttgcagttgatacatttgttgagcctgtaacttctgaagcaactactggacttgttgaggttgatgctgatgaagccggcgctgaacttgtagcacttgttgaagctggtgctgttgaagccgatgctgaacttgtagcgcttgttgaagctggtgcttccgaacttactgctacacttgatgaaactgagcttgtaggtgcaaccgacggcgctgtaactgtttcagttgctgctggtgctaccgtagcagttgctgcactttctggtgctgtgcttggcgaagtggtggttgagactccttcaccttgacttgcacttacagctgtagctgcaactgttgctccatcagatgtcgtttcatccgcttgagctgtgtgaccaatcatgatcaaagtaccaagcaagaccgagcagactccgatattcaatttacgaatcgagaaacgactcttcttactaaagatatctttacccatatttcctcctagacaagaaatcattagattttgattgctcttgtctcttctaaaaataatataaattgaatttccctaacataaaatatatcatataattagaattgaatcaatattttaccatcataaaattagttttctctatttttttaaaataacttaagcattatcctttaaaaaatattatttttttacaccctctttttatacagaacctataaaactttacacatataattcaaaatataaaaaaagctttttatccaaagcctttagagcaccttataatgttaacgtatattactttttaaaagcattacaattttcgaatcatagaataattctcacgttttacactctcaacatttataggtacactcataataaaactaataaccaagtataaatatgcatatttttagatttattaatgccattaaattaaaaagatatcaataattttaatgattgtttttttcatcaagctttatttttaactgaataattaaaaaaatattctataatgtctgtaatggctaaaactgctatagagattatagagcctgtatttttaatactaaaattgccattatgaaccagttcgataagaagtcactaccctatcgagccttgaaaaatcactggcgactcttgcaaaaggtcagccgtaggctaccacacaactctttttttcaatcaaactttagtaccacatgaaatcattgagaagacatcggtcttttcagaagagttcgctaatgcctacaaactttaccagctcttactatttcactttcaggagaagagagtagatgagttctttgagttgatagaggagaacatgagcaaggtcaatcactactttcaaacggtctttaggacttttcttagacacaagcaatacatcaaaaacgtactagaaactgactattcaaacgcaaaacttgaagagactaataagttaatcaaagacatcaaacggttgggcatcggttttagaaacttcatcaactttaagaaacgtgtcttcatcactctgaacatacataaaaagaggacctatccggtcctctctagatgttagcttttcgtcacccactacagttgacaaggagcccacaaaagagacccacccctatcgggatgagtctctttttcgaaaactgaaatagtctaactaactatgttgagggatttaacctatgaactatcttagtcttcttttttgcgttttcctgccaaaccaagtccagctgccgcaaggattcctccgagagccatagctgccatagacgcatcatcacctgtttcagggagtgctggtcctttaggagcttctggtgtagttggtggtgtcactggtggaaccactggagttggaggagtcggtggtgttggtggtgttggaggagttggtggagtcggtggtgttggaggagtcggtggtgtcacaatattgttgaactcagtatcttctggcaattgagaagttactgtcaagactttaccgtctttagttactgaaacaacgactgtagcaaccatcttatcgtaggtaacagttgcatcgttaccttgtacttcttctactgtgtagacgtgagtaccttcttcaccacgtttgtactcaagagctgagaacttgatcttaccgttagcatcattgcttacagtttcgatcacattacccttgctgtctttaagtacgaagctaaactcaccagctttaagttcacgaccttcaagtttcttagtgaattcaaactcaaccttagttgggatattgactacacgtttttctgttggtttttctggtttttcaacagatttcttagttgggtcgtattggtgaacgatttgtgacgcagtattttcgatgtctacaccatctttagcagtgcctttgatagttgcaggaatatcgaacttgtagtagcgtccgaatgccaatttggcagtatcgatcacttgtgtgttttctgcatcgccaagtgacttagtaaggtcagctttagatgttgcagtaatcacaccgtcaacgatttggatatcgaacttagctgtcacatcttctcctgttacagagtcgtatgctttaatatcagcaacgttgatgttcaagttttcgctgtcatatttatctgtaacacctacagattggatattgtgagcgtcagtgaagttagttgtgtcgagccatacttggtagacaaacttatcacctttcttgagtgtcttagtattgatattttcagcttcgttgttagctgtgctgtcagcgtaaggatccttgttagtatcgcctactttatctttcaactcagcatcatcgtcaacaagtttcataccagtgatatcgaatttctctttagaaacaacgtatttctctggttggaacttaggtttttctggtggacgaacagtgttgttaaattctttgtctgctgggtcgttcactttagtgataagagctttcgctttaccatcatgtgatacttcaacagtgacaagagctttcattgaatcgtaagaaacagttccgtcagtacccttaacttcttctacagtgtagttgtgagtaccttcttggcctttcttgaattcaagagcagcaaatttaacgttacctgcagcgtcgttcttaactgtttgaaggatgtttccatctttatctttaagaacgaagctgaattcgttggctttaagttcacgaccttcaagtttcttagtgaagttaaattcaacttcaactgggatgttaactacacgtttttctgttggtttttcaggtttcttaacagtcttactttgtggatcgtattggtgaacgatttgtgaggctgtattttcgatgtcaacaccgcccttagcagattgtttaatttctgctgggatttcaaacttgtagtaacgtccgaaggcgaacttagttgtgtcgataacttgtgtgttttctgcatcgccaagtgacttagtaaggtcagctttagatgttgcagtgattacaccgtcaacaagagtgatatcgaacttagctgtcacatcttctcctgttacagagtcgtatgctttaatatctttaacgttaacagtcaagttttcgctgtcatatttatctgtaacacctacagattggatattgtgagcttcagtgaatttagttgtatccaaccatacttggtagtatactttatcacctttcttgagtgtcttagtattgatattttgagcttcgttgttatcagtcttatcagcgtaaggatttgcgttagtgtctgcaaccttatctttcaattcgctatcgtcatcgagaagtttaactcctgtaagatcgaatttagattcgttaaggatgtatttctctgggttgaagtctggagtatctggaggagttactttgttgttgaactctttatcagcagcatctgtcacgttagtgataagtgctttagctgttccatcatgtttaacttcaactgtaacaacagctttcataccgtcgtattgaactgtgccgtcagtacctttaacttcttctacagtgtacttgtaagtaccttcttggcctttcttgtactcaatagctttgaacttaacgttacctgaagcatcgttcttaacagtttcgatgacatttcctgcttcatccttcaattggaagctgaattcgttagctttaagctcacggccttcaagtttcttagtgaagttgaattcaactgagattggaacgttgttaacacgtttttcagttggtttagtaggaatttctgtcttcttagttgttgggttgtagaagtgaacaacttgtccagctgtattttcaatatctacaccaccaggaacagagtctttaacagtggttgggatatcgaatttatagtaacgaccaaaggcaaacttagttgtgtcgatgatttgagtatttgcatcatctccaagtgacttagtgaagccatctttaaggttagcagtaatcataccattttcaactttgatgtcgaatttagctgttacatcttcacctgttactgaatcgtaagccttaatagctgaagcatcaagatccaatttagtttcatcgtagtcatcagagataccaactgtttggatgtaatccttgttgttagcgtcgaattgagttgtatcgagccatacttggtaaacaagtttttcaccacgtttaacagacttagtattcatgttttcagcttcgttgtttgatgcgtcatcagcatatgggttcgcatttgtatctgcgtacttgtctgccaattctttatcatcatcaacaagcttgttaccagtgatgtcaaatttctctttgttcacaacatatttctctggttggaacttaggtgtttctggtggaaccaccttgttgttgaactctttatcgttagcgcttgaagcgaatccgcctgttgaagcgtggttaacgacagttgtgagaactttgccttccttagtaacttctactgtcacagtcgctttcatagcatcgtaagtgattgaagcatctttaccggctacttcttcaactgtgtaagtgaatgtcttaccaagatctgctttgttgaacaagagtttttcaaacttgatgtgaccatctttatcgttggttactgtttgaagaaccttgttgtctttgtctttcaatacgaagctgaactcacctgcagtcaactcacgtccttcaagtcgtttagtatagttgaactcgagtggaactggaacgttgttttcacgtgtttgagttggtttttcaggagttgtaactttcttattgaatgggttgtattggtgaattgtttggttggctgtattttcaatatctacaccgtcgttagcatcaatgtctttaacaacagctgggatatcaaatttatagtagcgaccaaactcgaatttagttgtatcgatgactggagtagcatctgtagcactaatagctttagtcaagcttgctttagatgtaccgtagagaacaccgttttcaaccttgatgtcgaacttgtcagtaacatcagcaccagtaataccatcgtaaaccttgatatcagcagcgttgatgtcaagtttatcttcttcgtagttatcagtgataccaacagtttgaagattgctttctgctgtgaagtcacgagtatcaagccacacttgatagtagatcttttgaccacgtttgagggtcttaccattcaagttttggatttcaactttatcagctgaatcgtcgtcatcagcaagtttgttaccaatgatgtcgaagcttggttctgaaacaacgtatttctctggtttgaagttaggagttacgttgttatcgaagacacgatcgtcaccaccataagcatctccacctactgtagcgtaagagataactgttgacaattgatctcctactgaaggttggataacttgaacagtaacattgactttcatgttatcgtaagtaacagttgtatcagttcctttaacttcttctacagtgtagttgaatgtcttaccaagatctgctttagaatagttgatagttgagaacttaactttaccttcggcatcattcttaacagtttcaagaacattacctttttcatctttcaattcaaaagtaaattctttatcttgcaatttacgtccgttaagtgtcttaccgaagatcaactcgatagcagttggaacgttgttaacacgtttttcagttggtttgtttggtttttcaacagtcttagtagttgggttgtagtagtttacaacttgagctgctgtattttcaatttcagcaccatcgtaagcaccgtcagtgaccttagctgggatgacaaacttgtagtaacgtccaaattcgaacttagtagtatcgataatttgagtgttttctgcatcgccaagtgacttagtgaagccaggtttaaggttagcagtaatcacaccattagcgattgagatgtcaaacttgtcagtaacatcagcaccagtcttaccatcgtaagccttgatatcagctaccttaacatccaatttagcttcatcataatcatcagtgataccaacagtttggatattatccttgttgtttgcatcaaatttagttgtatcaagccatacttggtagttaatagtgtcgccacgttttacagctttagtattgatgttttctgcttcgttgttatcagctttatcagcgtatgggttcgcatttgtttctgcgtacttatctgtcaactctgcatcatcatcaagaagcttagtaccagtgatatcaaacttaccgttaccatcgctaagaacgtatttctctggttggaacttaggttcttctggtggagttacagtattgttgaactctttatctgctgggtctgtcacattagtgataagagccttagcagtaccatcatgacgaacttcaactgttacaacagctttcattgtgtcgtatgtaacggttgagtcagttcctttaacctcttctactgtatacttgtaagtgccttcttgacccttcttatactcaatagctgagaatttaacgttacctgaagcatcattcttcacgctttcaacgacttcgcctgcttcattcttcaactcgaatgtgaattcgcctgctttaagctcacgaccttcaagtttcttagtgaagttgaattccacttcaactggcacgttgttaacacgtttttcagttggtttgtttggtttttcaactttcttagttgttgggttgtagtagttaactacttgagccgcagtattttcaatatccacaccaccaggtacatcagctttcactgttgttgggatgtcgaacttgtagtaacgtccaaaggcgaatttagttgtgtcaataacttgagtgttttctgcatcgccaagtgacttagtgaagccatctttaagagttgcagtgattacaccgttgttaacagtgatatcgaatttagctgtaacatcatcacctgttactgaatcgtaggctttaatcttagtagcgtcaaggttcaacttagtttcatcgtagtcatctgagattcctactgattggatgttgtccttgttagctgcgtcaaatttagttgtatccaaccaaacttggtaaaccaatttgtcgccacgtttcacagtcttagtattcaagttttgagcttcgttgttagacgcatcgtccgcatatgggttcgcatttgtgtctgcgtacttgtctgccaactctttatcgtcatcaacgagcttgtcgcctgtgatatcaaatttctcttcagaaacaacgtatttctctggttggaacttaggttcttctggtggagttacacggttgttaaattctttatccgcaatgtcgcctacagtcgcgataagaactttagctgttccatcgtgtttaactgtaactgttacattcgctttcattgtgtcgtatgtaacggttgcgtctgagcctttaacttcttctactgtgtagttgtgtacgccttcttggcctttcttgaactcaagtttagagaacttaacgttacctgatgcatcattgcttacagtttcaagagtcttaccttctgaatctttaagaacgaagctgaattcgttagctttaagctcacggccttccaaacgtttagtgaagttgaattccacttcaactggcacgttgttaacacgtttttcagttggtttgtttggtttttcaactttcttcgtagttgggttgtagtagttaactacttgagccgcagtgttttcgatatctactccgcctttaacatcagctttcactgttgttggaatgtcgaacttgtagtaacgtccgaaggcgaatttagttgtgtcaataacttgagtgttttctgcatcgccaagtgacttagtgaagccatctttaagtgttgcagtgatcacaccgttgttaacagtgatatcgaatttagctgtaacatcatcacctgttactgaatcgtaggctttaatcttagtagcgtcaagatccaacttagtttcatcgtagtcatctgagattcctactgattggatgttgtccttgttagctgcgtcaaatttagttgtatccaaccatacttggtaaaccaacttgtcgccacgtttaacagtcttagtattcaagttttgagcttcgttgttagacgcatcgtccgcatatgggttcgcatttgtgtctgcgtacttgtctgccaactctttatcgtcatcaacgagcttgtcacctgtgatatcgaatttctcttcagaaacaacgtatttctctggttggaacttaggttcttctggtggagttacacggttgttaaattctttatccgcaatgtcgcctacagtcgcgataagaactttagctgttccatcgtgtttaactgtaactgttacattcgctttcattgtgtcgtatgtaacggttgcgtctgagcctttaacttcttctactgtgtagttgtgtacgccttcttggcctttcttgaactcaagtttagagaacttaacgttacctgatgcatcattgcttacagtttcaagagtcttaccttctgaatctttaagaacgaagctgaattcgttagctttaagctcacggccttccaaacgtttagtgaagttgaattccacttcaactggcacgttgttaacacgtttttcagttggtttgtttggtttttcaactttcttagttgttgggttgtagtagttaactacttgagccgcagtattttcaatatccacaccaccaggtacatcagctttcactgttgttgggatgtcgaacttgtagtaacgtccaaaggcgaatttagttgtgtcgatcacttgagtgttttctgcatcgccaagtgacttagtgaagccatctttaagagttgcagtgattacaccgttgttaacagtgatatcgaatttagctgtaacatcatcacctgttactgaatcgtaggctttaatcttagtagcgtcaaggttcaacttagtttcatcgtagtcatctgagattcctactgattggatgttgtccttgttagctgcgtcaaatttagttgtatccaaccaaacttggtaaaccaatttgtcgccacgtttcacagtcttagtattcaagttttgagcttcgttgttagacgcatcgtccgcatatgggttcgcatttgtgtctgcgtacttgtctgccaactctttatcgtcatcaacgagcttgtcgcctgtgatatcaaatttctcttcagaaacaacatatttctctggttggaacttaggttcttctggaggagttacacggttgttaaattctttatccgcagggtctgtcacgtttgtgatcaaggctttcgctgtaccatcatgagatacagtaacagttacaacagcagccatttcatcgtaagtgacagttgcatctgtacccttaacctctgttacagtgtacttgtaagtaccttcttgacccttctggtatttaagggctgtaacagttttaccagctttatttgtgtactctactggagagaatttaatcttaccagctgcatcgttggttgcagttgcaatcacaacattgtcgctatctttcaactcgaatgtgaattcgccagctttaaggtcacgaccttccaatttcttagtgaaattaaattctactgagattggaacactgttgacacgtttttcagttggtttgtttggtttttcaacagtcttgcttactgggttgtagtagttaacaacttgggctgctttgttttcgatatctgcaccagctacaacatcgtctttcactgttgctggaatatcaaatttatagtagcgtccaaattcgaacttagtagtatcaatgatttgagtgttttcagcgtcgccaagtgacttagtgaagccagctttaaggttagctgtaagaacaccgttgttatcagagatatcgaacttgttagtaacgtctgcaccagttacagaatcataaaccttgatttctgaagcattaacagtcaatttatccttgtcgtagttatctgtgattcctactgtttggatgttgtctttgttagctgcatcaaatttagttgtatccaaccatacttggtagtaaagtttagatccacgttcaactgacttagtatttaagttttcatcttcgttgttgtttgtattatcaacatatgggtttgtgtttgtttcaccatatttatctgtcaattcagaatcatcatcaacgagtttagtaccagtgatatcgaatttcgctttagaaacaacgtatttctctggttggaacttaggttcttctggaggtgttacacggttgttgaattctttatcagcagcatctgttacgttggcaacgattgctttagctgtaccgtcgtgtgaaacaacaactttaacagtggcaaccattgtgtcgtatttgacagttgtatctgtaccaggagtttcttctactgtgtagttgtaagtcttaccaagatcatcgcgaccaaattcaagagtcttgaagacaatcttaccagcagcgtcgttcttcacgcgttcaacttcaacgccgtctttcttcaatacgaattcgaattcgttagcttgaagttcacgaccttccaaacgttttgtgaagttcatttccactggaactggaacgctgttaacacgtttttgtgttggtttgtttggtttttcaactgtcttgcttactgggttgtaaacgtgaactgtttggttggctgtattttcaatatcagcaccagctttaacagattctttaacagttgctgggatatcaaatttatagtaacgtccaaatgcgaatttagtagtatcgataacagggttgtttactttatctttgataaattcatctttagaagttgcagtgattgtaccattttcaactttgatgtcgaatttagcagtcacgtctgcaccagttactgaatcgtatgctttgatgtcagcagcgttaacgtccaatttttctgcatcgtatttatcagatacaccaacgtattggatgttgttagcttctgtgaatttagtagtatcaagccatacttggtataccaatttagaaccgcgttcaacagtcttagtattcaagttttctggttcgttgtttttaacaccatcaacatatggatttgcatttgtttcagtgtactcgttaccaggtacatcatcgtcgtcatccatcaacttgtcaccagtaatgtcatatttctctttagaaacgacaaatttttctggttggaattcaggagtgttcggaggagttactttgttgttgaattctttatcggcagtaccgtcagtagcattaccgttggcatcaaccccaccagttgaagatacgtttgtaacagtagtcaatgtgtgaccattcttagcaacttcaactgtcactgtagctttcatttggtcgtaagtcattccgaattctttgttttcaggaattacttcttctacagtgtaagtgtgtgtaccaactttagtattgtcgaatgacaattcagagaaggttacgttaccagcagcatcatttttaacagtttcaacgaccttaccagcagcatctttcaatacgaagctaaattcaccagctttaagttcacgacctgccaatttcttagtaaagtcaaacttagtcacaactggagcaacaacatagttgttgaactcagtgtcttcaggcattgtaacagcagtactcaagagacctgtagcggcatctttagtaactttaactttcactactgcgttcatagtatcgtaatcgatatttgtatcgttaccagctttttcacgcacagtgtaagtgtgttcaccttcagcgctgtattcaatagcatcaaatgtgattgaaccatctgctgcatttttcttagtttggattacattgccattttcaagcaattcgaatgtgaaggcatctgcttcaagtgctttaccttcaagacgtttagtgaacttgaattgagcttgagtaggagcagatgtgaaggtattgttgaactctgtatctgtaggaagagtatttgttgctttaagtacgtgaccttctttagtaacagtaattgttacttcagctttcatcgtatcatattgcattcctgcttcagaaccttgaacttcttctacagtgtacttgtgagtaccaacttgtgtattgtcaaaagtcaaatcgtcaaaggctacaacaccttctttagtatttgtcttagtttgaagaactttaccagttgaatctttcaatacgaagctgaattcaccagctttcaactcacgacccgcaagagctttgctgaagtcgaaacgagtcttaactggagctactgcaaagttgttgaactctgtatcttctggcattgtaacattagcagtcaagataccagatgcagcatctttagtaacgttaacagttactactgcattcatatcatcgtaatcgatgtttgtatctgttccagctacttcacgtactgtgtaagtgtgagaaccttctttatcgtaagaaatagcgtcgaattggattgttccgtcagccgcattcttcttagtttggattactttaccattttcaagcaattcaaatgtgaaggcatccttagtgagctctttaccttcaagtttcttagtaaacttgaattgagcttgtgttgcagcaggagtgaatgtattgttgaactctgtatctgctggaagagtgtttgttgctttaagaacgtgaccttccttagtaacagtgattgttacttcagctttcattgtatcgtaagtcataccagcttctttattttctgggataacttcttctacagtgtacttgtgagtaccaacttgagtattatcaaaggtcaaatcatcaaaggctacaacaccttctttagtatttgtcttagtttgaagaactttaccagttgaatctttcaatacgaagctaaattcaccggctttcaactcacgacctgcgagagccttgctaaagtcaaacttagtcttaactggagctacaacaaagttgttgaactcagtatcagctggcattgtaacggcagcgttcaaaagacctgtttgagcgtcttttgtgacatttacagtcacaactgcgttcattgaatcgtaatcaatgtttgtatctgttccagctttttcacgtacagtgtaagtgtgtgtacctacagttgcatatgagattgggtcaaattgaattgaaccatcaaccatattttgtttagtttgaatcacattaccgttttcaagcaattcgaatgtgaaggcattagcttcaagagtcttaccttccaaacgttttgtgaagcggaattgtgcttgtgttgcagcaggtgtgaaagtattgttgaattctgtatctgcaggaagagtatttgttgctttaagtacgtgaccttctttagtaacagtaattgttacttcagctttcatcgtatcatattgcattcctgcttcagaaccttgaacttcttctacagtgtacttgtgagtaccaacttgtgtattgtcaaaggtcaagtcatcaaaggctacaacaccttctttagtatttgtcttagtttgaagaactttaccagttgaatctttcaatacaaagctgaattcaccagctttcaactctcgacctgcaagggctttgctgaagtcgaaacgagtcttaactggagctacaacgtagttgttgaagatcttatcagttgcgcttgaagcaaaaccaccagcaccactgtatttaactgaagcttgcaaatcacctttagagttctctgtaacagtaactgtcatagtaactgtcattgcatcgtaatcaacgtttgcatctgaacctgcagtttcagtgattgtgtagatgtaagtaccaactttattgaaagttaagttactaaatgtcgctttaccgtttttgttagtaacagtttcttcatatgaaggaagtgatttgttttcattgacttctttaatcttgaagctgaattcaccatcaacaagtacacgtccttcaagttgtttttcaacttctggagtaactgttacaggttcttgcttcacgtagtagtaaataggttgtttgtacggtgtcaaagtgttgagcaagtcaacgttggtaccgatacctcctaccccacgttccaattgtgagttagctgaaccgtgtccaattccatctcctaagaatggcacgaatacactatgatatggtgcatatccagaagctttttggaagtcaaatggaacttctttaccgtttggatagtttgtttttgcacctgttttttcatcagttacggtatgtgcaatagtgtaaagaggtgattttttaacaactaagtcctgtgaattccattcacctggtttaattggcttagtttctgctagcaacatatatccatcggtacttaatgaaccatcagaacgtttgctttgttgtcttggatctagcaagtaaacacgaataacgactgaaccgtcttctccaacaacttctttgatacgtttgataccgtaacggtccgcatccatgaatttcgtaccaacggtgtaaggacgacttacagtacctgattgatcatttgcgtcagcagtttggtaaagtttgtatccatcaaattgacgttcgccagatgctgtgaaacgttgcccttcttcagctttaagagtgtatctagctaactcaacttcattaccattttctttataatcttgaacagttttatctgttttattagcgttgaaagtagggttgtttttatcaactactttatagtaagttgttttattgattgttactggtattttagcatttgaatcagtaattgtacgaccattgtatgctggttcaacaacgttgatgatatcagttgtagtacgagcgttataaaccgcagtataaagtgctcgctctgcttctgtaagtttgtgtccagcagctactaagtctgtgatactctttccaacttcataaccattttgaataaatggttctgcttttttaccacttggagcagtcccagctttataatctacttggaaagttaattggctattagacgctgccgtagtagtcgtgaatttttgaacaccactagaagcagtaacagttcttgtttctactacactaccagtgtttttgtcgagcaattcaacagttgtatcggtagagtcatcaaatctcttataagcacgtgcataatattttgtattataacgtttattgaattcagtaagatcccaaatagcatacgtatagaagtcgccttctttagcttgataaccagctggtacagtttgagatgcaacacttgcaccattaggatccgtcatatcaggtgtagcaacttcaccgtcttttaggaaagttgctacagcaaccggctcgttattgtggtctgtagcggcacgacggttacgacggctacgactcattgccaaagctccaccgttagtcatatcagttgctgcacggtcaagtgttgcacttcgaactgctgctgatccaacagaataaaaacgtgcagaaccacgtgtgttaagacttgtagttgcagcagcagtttcagctgctgctgtttcttcagctactggagctgctgttgcagcagaacgattagctgctgtagttgaagcgtttgaagctgcagttgttgaagctgttgtttcaacgttattgctagctgcatttgtagatgccactgcagctggttttgctgcttctgaagtagctttctcagttggttttgcagcctctgaagctggttttgctgcttcaggttttgcagtttctgtagcttgtttgtcagttgtctctgcggcagccttatctgttgttgatgcttctggcgtcaagttaaatgttgacgcagttgcctcagttgaagatacagctgcagtaggatctgcttgagctgttgatgctgtagacgtctcaaccaggtctgaagaactttcgccctcaactgatgtaccagggtttgatgaagaagcgtcaggcgctgtgacttcatcagcctgtgcagtatgagcagcaaagagtgccgttcctagcaagactgaagcgacaccaaacgaatatttacgcaatgaaaatcgttggcgtctgttaaaaatgtctttcatttcaagtctccctctgtatgaaatagttagttataggtcacgagtatacaaaaaatcctatacgtgtactcatgatacaattacattctaacattctgacaatttatggtcaagtgattaaggcaacttttttaaaaaaaatcaagttgtctgacaatttatccggcaactttcgttcattttttacctttacaagtgtaaaacccttgattttatttactttataccgtttccaaatttctattttattttcttttcattcctaactttctcatgtttttcacggaagatgttagacttatgagaggatttaactcattttattggctgattttctcactttaattctaatttttaccttcttattacaaaccatccgattctgtaacaccctcgataaatcattgatatacaatttaataattgcctttcacgacaatagtcacccactacattttcaaaaaaataaaaaacccaagcatcatatacttgggttaatcatcttattggttccagaagtgacttcctctatttttttctgatatggttgtcattccaagactgcaattcttgataggacttgactttcccttcttcctgagtcggtctaaaagccctaaccggtaactcgtagccatcctgcccttcaggtgccatccaatggagcaaggtattgaaccaggtttcgttattgattttacttggaatcgtatagattctagcatgtttggtcttaacagcttcataggcttccttttgctctttggcaaaattggtactatccatattgaggctcctgtctttttcagaaatgtaataaagagcaggtagactagcaattggcgttccagacggattatcaaaatccttaccattagttgcacctggccacatctcaagaccaaaaggctctaaagtcttacgcatatcaacattagcgtactccaattccgagtccaaagtattcgagttagctgagatattcatttcctcgatcttttgagttttgagattgaggtattttttattagaagcaaaatcaactgacgatgcaccaaaaggcatttgtaagtaggcttggtcattaagcatgaaaagtcttagacctgcctgatttaaataatcttcatccccagctttcttagccaatttcaagaggtcaatttgtttaggcttctgatttgttttttccgtgtcatacacatagatattaaagtagtcatatttataaagagtttcacccttggcatttttcttatcagatacatctcccttgtactcctgagtgactaggtattgaccagctacccctacaatgttaaacatgtttctatcatgaccaggatttggtgtcacgagtagaaattccttattatccccgaaggttgtcagggtgattttaaacaagggatcttctgcattgctgccggaatagacagttgtacttgacttgctagatgaggctgagcccttggtagccttactgctaccactcacagcaaaaaagatagccgttcctgcgattacaaaaagcaatgccactaagagacctataaaaacaatttttgttgtcttatcccccttaggtgttggcttctttacaaacttattttccataataatctccatttttcagtattacttctagtatagcataggtggggactattgataaggtgcatcggcggtctaagagggctggatttttgattttcatttgacaaaatccgttagacagcgtaaaatcgagacaagtaacattcggaggtaaatggagacatgaacaactaagtctattcacaataaacctgctttatttgatagattgttttcatgtcttttttgcgctctttttctgtagaaaacttgttgatggtatctgcgcttttttgcgtccacaccatcactatctcctagagagctttttagctagattcaaggcagttctatcttataaggtaggactgttttttgacctttgatattgtttgaagtaaaaaactacttcaaacaatatccacaaacactctgacctaggaggtcctatgatacagattcaacacctaaccataacacataccaaagatttgcgtgaacttgttcatgatctaaatctaacgatagctacaggcgaaaaagtcgccatcattggggaggaaggcaatggaaaatctagtctccttgccgttatggtcaatccaaaagcacattttgaccatctgtcttacgagggaactattaacaaaacagatagcccactggtctatattccccaacaaatttcggataacttgcaatctctaacccttaacgactacttctttgcggacacttatgacctagactatgccaccctctatcgtctggctgatgaacttcgttttgatagtgagcgttttgctagcagtcagctgatctccactctatcaggtggtgagaaactcaaaattcaactcatccgagaattagctcgtccccacgacatcatttttcttgatgagccttcaaacgatatggatttaactactatgacttggttaaaagactttatcaagcactctgataaaacgatcgtctacatctcacatgacgaagatttactcagtcagacagctgataccattatccatctggaactccttaaacgtcgtcaacaggcaaggaccagtgtggaacacctcgactatgataactacagccaacatcgcactgatagctaccaacaacagatgcagcaagccaaaactgagaaaaaagcctacgacaaagctatggccaagcatcgccgcatcaaacaaaatgtccaaaccaccctacgaaatacgcatgacagcacgcaaggacgattgcttgctaaaaagatgaaaactatcctctcacaagaaaaacgctacgaccgccttgcccaagatatgacacagatgcctgataaagaagacagtattgaacttttcttctctcatatcgaccctctacctcaaggaaaatatctcttaaatctagatgaaaagcagataaacatcgctcctcacctgactattgaccatctcaaactttctttgaaagggcaggaaaaaattggtattgttggagataacggctgcggtaaatccactctcttacactatctctaccaaaaacttagtcagaagaccgacctgactattggctacatgccccaacattacgatactatcttgcaaaatgatttgtcaccgatagcgtttttgagtaagactggcgacaagtctgaacaagaggttataagctcccatctcgccaacctcaactttagtcatgatgaaatgaaccatgcaatctctgatttatctggaggacagaaaggaaaactactcctactgcacctggtcttagaaagccctaagctgcttatcctagatgaaccaaccagaaatttttcacccacctcgcaaccccaagtccgacagctcttcgagaactatccaggggcaattcttacagtatcacatgatgtcaactacctcagacaagtctgccaaaagatctatcgcctagactcacgaggtttagaagaagttgagatttaagatctcgaatctatcgtttttgcaagaaaagtctcaaaagaaaccttttcttaaatgaaaaaactcaggcaaaacctgagttttttagtcttaatcaatttcaagaccaccagtatagagtcggtaataagtaccaccttgctccataaggctgtcgtggtcaccacgttcaatgattcgtccgtggtccataaccatgataacgtcagagttaacaatggttgaaagacggtgggcaataacgaagaccgtacgtccttccataagtcggtccatcccctcttgcaccattttttcggtacgagagtcaatagaggatgtcgcctcgtcaaggataagaaccggtgcattggcaagggcagcacgcgcaatggcgataagctgacgttgcccattagacaagcctgcaccgtcatctgtaagaacagtgtcatacccattatccaagtgttgcacaaaggaatccacgttagcaatacgggcagcttcaagaatttcctcacgtgtcgcatcggcacgaccataggcaatattttcagcgatagttcccgtgaagagatgggtatcttgaagcacgataccaagtgagcgacgaagagaatctttctcaatcagcttgacatcaataccatcataagtaatcacaccagattggatatcgtagaaacggttaatcaagttggtaatcgtcgtcttaccagcacctgtcgcacccacaaaggctaccttttgccccttgtctgcatagagattaacgtcatgaaggatttgtttcttaccatcgtaagagaaatcaacgtcttggaagaccacatttccgaccaactcgaccaattcgtagtcgccatttggacgtgggtgtttccaagcccagagattggttttcttgtctgtcacaaccatctgaccatctaccaattcgtagttgaccaaagtgaccttaccttggtctacttcttctggctcatccaagaggtcaaagatacggtcagcaccagcaagtgccataagaacaaagttcagttgttgagagacctgagtaataggtccgttgaaggaacggttcaattgtaggaaggccatgagaccaccgatagtcaaaccaccgacaccattaagggcaaagagtccaccaaccaaggcggtcaaaacaaaggaaacatttcctaagttcccaagaattggcatgagaacattggcatagcggttggccaagtaagaagattcaaagagttgctcgttaatcttgtcaaaatcagccatgctttcttcttcgtgaacaaaggccttgaccactttttgacctgacatcatttcctcgatgaaaccattctcaatccccaaattcttttgttgttcaccgaagtaacggcctgatttggctgatacatttttgatgaccataaacatgatacctaccatgactaggaccacgataaagaggagaggactaaccgtaagcattgtcactgttaccccgataagggtaatagccgtttgtagcaactgtggaatggattgctcaacagcctgacggagagcatcgatgtcgttggtgtagatagacatgatgtcaccgtgttggtgagtgtcaaagtagcgaacaggaagcttttgcattcgagcaaagagctgattacgaagggaacgtagagaatcttgcgaaatcgtcgccatgaggagtgatgacacatagttggcaatcacaccgataagacagaagacagccactgaagtcaagaaatgtaaaagcggaccaaagtcatggctaccagatttgagcatgggttgaacataaacgtcaaccaaggactgaatagaagccgtcaaattgaccgttgccaaggaagcaaccacaataaggacaaaggcgatagaaagcgaaagtttgtagtcttgccacaaaaagcgtagaagacgtgctagagagccccaattagcttttttcttattctgcatctgctactcctttcccttgtgtttgcatcttgtagacgtcacgataaatggcattgttagccaccaattcatcgtgggtaccaatagcatcgatacggccatcatccataacaacgatgcgatctgcatcttggatggatgaaatacgttgaccaatgataatcttagtggtgtccttaagactagatgccaaaccttgacgaatcaaactatctgtcttggtatcaaccgctgatgttgaatcatcaagaatcaagatttttggattcatgaggagggcacgtgcaatacagagacgttgacgttgtcctcctgagacattggctccaccacgttcaatcttggtgtcatagccatccttaaactcttggataaattcatcagcttgggcaatcttacaagcttcaatgatttcttcatctgttgcctgtttattcccccaacgcatattttccttaatggttcctgagaaaaggacgttggtttgaagcaccatggcaacttgcttacgcaagctatccaaatcatagtccttaacatcgtggccagcaaccctaacctgaccggcttccacatcataaagacgaggaatgagctgaaccaaacttgatttaccagaacctgttccaccaagaataccgataacttcaccagacttaatatcaagcgtaatatctttgaggacatgggtcttgtcaccattttcatcagtgtatgagaaatccacatgatcaaagctgatagaaccatctgtgacttctgtcaagccattttcaggtgaaacaatagtagattcagtattaagcacttcattgatacgctctacagaggccatagagatagacaacatgacaaagatcatcatgaacatcatgagtgagatgaggatggtcatggtgtaactgaacatggaagtcaattcacctgtagatagcttgccgacaacgataagatgagcaccaaaccaagaaatcatgaggaaggatgcgtacatagacaacatcatggctgggttagacatgacaaccacacgaatagcacgcatgaacatcttgtaaatacgacgtgaggccttcttgaatttatccgtctcttcctgctctttaacataggatttaaccacacgcatgttggtgatattttccttgatactattgttaaggttgtcataagcctcaaacacttgagtaaagagagggtatacaatcttggtaataatggccaaaaccagaccaaggaagagagtcacaccaacgaaaatccaagccatttcgccattaatcaggaaacttgctgcaatggcaaagatcaagttaaggggtgcacgtacacagatacggataatcatctggtaagagttctgcacgttggtaacgtcagtcatcatacgtgttaccaaaccaccagctgagaacttatcgatattttcaaaagagaaggtttgaacctttttaaaaatagcctgacgtagattcttggcaaatccagcagaggcaaaggccgcatagcgtgccgactgcatcccacagaaaagcgacaggaaggcgcagaccaacatgaggccaccatagagccaaatgttagacatgttagattgctggacacctttgtccaaaagattggccatgacaaagggaatagaaatctcaaacatgacttctagcgtcatgaagagggacgctaggattgagggtttcttgtattcctttatctgggcgatcagggtttgaaacataattacctccgtttttattcttattctttttttcttttgatatttttcttttttgatgctttcttaagtgatggcggacgtcagcgaccgactcagtcgttccatgactagttatcgagccaaagtctcgataactccgcttcctataactgcttctgcagttataggaatatcatcacggcgaaagcatcgttattgggcagagcgaaccgtcgaattgtgagcaacttcgaacaagtgcaaataggttcagaatggtctcgaccacggcgaaaaatatcgtctactctgggcagagcgtgtttcatgcattgatagatatacaccatttttgtaatctatcacggcgaaagcatcgctattgggcagagcgaaccgtcgaattgtgagcaacttcgaacaagtgcaaataggttcagaatggtctcgaccacggcgaaaaatatcgcctgctctatgcagagcgtgtttcatgcattgatagatatacaccattttgtaatctatcacggcgaaagcatcgttattgggcagagcgaactgtcgaatcgtgagcaattcgaacaagtgcaaatagattcaggatgagccctaccacgacgaaaaatatcgtctgctctgggcagagcgtgtttcatgcattgatagatatacaccatttttgtaatctatcacggcgaaagcatcgttattgggcagagcgaactgtcgaatcgtgagcaattcgaacaagtgcaaataggttcagaatggtctcgaccacggcgaaaaatatcgtctactctaggcatagcaaagcttaaaactaacagtcttatgcttatcatttatctataaaagaacggtcatacccttttgagagcatacaaaagcccctgagggcagaccctagggattttttcgttctcatatatatgtcattagtataggttaaattgagtaaaattgcaagtacaatgtcatttcactaacatttgtaagcattttacgatgtttgataaaaaaatcgttctaaaacctgctcatttttcacaaacttatcataaatgttcgtaaattatcgccatacgtagcagaaatttgttttctgttcctatttataatagactaacactaacattagatgaaaaggtgactctatgactataaatcaactgcttcaaaagctggagcctaccagccctatccttcaagctaactttggaattgaacgcgaaagtcttcgtgtcgatagacagggaaaattagcacatacgcctcacccttcttgcctaggagctcgaagtttccacccttatattcaaacagatttttgtgagtttcaaatggagctcatcacaccagttgctaaatctaccactgaggcccgtcgttttcttggagccattaccgatgtagctggacgttccatcagtaaagatgaacttctctggcccttgtccatgccacctcgtatcaaggcccaagaaatccaagttgcccaactggaaaatgaattcgaacgccattatcgtaactacttggctgaaaaatacggaaccaaacttcaagctatctcaggtatccactataatatggaacttgggaaagatttggttgaggctttattcaaagaaagtgaccagactgatatgattgctttcaagaacgccctctatcttaagctggctcagaactatttgcgctaccgttgggtgattacctatctctttggtgctgcacctgttgctgagcaaggcttcttcgaccaagaagtgccagaacccgtgcgttccttccgtaacagtgatcatggttatgtcaataaggaagaaatccaagtatcttttgcaagcctagaagattatgtctctgccatcgaaaactatatcgaacaaggagatttgattgcggagaaggaattttactcagctgttcgtttccgtggacaaaaagttaatcgctccttccttgacaagggaatcacctatctggaattccgtaacttcgacctcaacccctttgagcgtatcggtattagccaaactactatggataccgtacacctactcctactagccttcctctggatggatgcccctgaaaatgttgatcaggctctggctcaaggtcacgcgctgaatgaaaagattgccctctctcatcctttagaacctctaccatctgaagctgaaactcaaaacattacgacggctctggaccaactggtgcaacattttggcctaggtgactatcatcaaggtttggtcaaacaagttaaagatgcctttgctgatcctaaccatacactagcagcccaactcttgcctcatatcaaagacaagtctcttgctgactttgcccttgacaaggctcttacctatcatgattacgactggactgcccactatgctcttaagggttatgaggagatggaactttctactcagatgctactctttgacgccattcaaaaagggattcattttgaaatcctagatgagcaggatcaattccttaaactctggcataaagatcatgtggaatacgtcaaaaatggtaacatgacctcaaaagacaactatgtagtccctcttgccatggctaataaaaccgtgaccaaaaaaatcctgactgatgctggtttccctgttcccgctggcgacgaatttaccagtctggaacaaggtctagcctattatcctcttatcaaggacaagcaaattgtggttaaaccaaaatcaaccaactttggtctgggtatttccattttccaagagcctgccagccttgataactataagaaagccctcgagattgcttttgcagaagatacagctgtccttgttgaagaatttatcccaggaaccgaataccgtttctttatcttggatggacgttgtgaggctgtcctccttcgtgtcgctgccaatgttgtcggtgatggcaaacacaccattcgtgaattggtcgctcagaaaaatgccaatccattgcgaggacgtgatcaccgctcaccacttgaaatcattgagctaggagacatcgaacaattgatgttaacgcaacagggttatacccctgatgatattctcccagatgggaaaaaggtcaatctacgtcgtaactcaaacatttctacgggtggtgactctattgatgtcactgagaccatggattcctcttaccaagaattagctgcagcaatggcgactagcatgggggcctgggcttgtggagttgacctcattattccagatgaaacccaacctgctagcaaggaaaaccctcattgcacctgcatcgagctcaactttaacccttctatgtatatgcacacctactgtgctgaaggacctggacaggctatcacttcaaaaatcttagacaagctttttccagaagttgccacaaatcaaaactaaaacttaaatcttaggcgcaaacaaatcacctttatctcgagataaaggtgattttgctttattaaccaaactctcctgcttcttcctcaggatgtgtttccatgtactggatgtgttgtatgtaggcatcttgagcctgattgaaggcttcctgatcactgtaaggataatctatgtaaaagaggtcccgccagccattcaaggtttggctattgtagaaaccttgaatctttgtgggaagaaactctttgttgtagctgatgcgcagcttgagtagggtcttatcctgaaactgagtgatgatactgttggaggtttcttggccttccaaactagtccaaaccttattcagaacaatgtcctgactatagtgatcagccttgatgcgatttttgttcactgggagcttctgggtcgcctctaaaaggtaggacacctctccttgaaaataagcctcaatggtcaaatctccaagactggagccatataatagaccatccttaatagcaatgtttgatccaaaaagtctttggccagccacatcaaaggacatcccctcatcctgcccatagagctttatggcatgggcatcccttacacgatagaaatttttagcgacaagaacactatcaagggtttcaatcttttttgtctccaccttggggcttgtaggtttcttggtaaaagctgtcaaacccattaagcacaagatgagagcgaatataatcaaggtaagcattgtagacctggagccggtcttcagctttaacttgtctccatgtttcaaggtctttcaagcctccttttttaacaatatcagcatagcgcccaccgtttaagacattcttgggatttttccacttcctaaccatcttgcgtctaatcgcattgtcagcaggatgacgaacgtcaagataggtatggctattattgagataggctggtaggtcagcattcaagcccttagacagcccatagttagcagagtccgtatcggcaatgtcagcaccatcttcaatcttataatgcttaggattagagtcgatgctaccgtctttccttttcttatagacattccactcagagacaaatctccccgtatccatattgacaataaactcaataaaacgggaattgctaactccataaggtcccatgacactggtctgaggtagctgaattttcatgttctgcggataggtaaagtctcccaagcttcgattatggtaggaagcacccgtagtgtaatccaaatgaatcttcttgtccttgctgtaggccagaagtttgtctaaatctgtcttgcccttgtagttggtcctaatatagtccatggactgcttatcaatccaagacctaaaaagatggagcttgatacctaagtcatccaccccaagccctagatccgtctgataggtctccataatagcctcacggaagtaactataaaaaggactggttggctctagcttcttggaaaatttataacctgacttccctaactggaggaactggtacttgtccacataaacctgcatgtgctccataaccaaattgagcttgtcatgattagggagttgagatgcttggaaaaaggccgtataggtatctgagcccacttccttgctttcttggtcaatgtcctgtaaaaccttgtctaactgggtcaaggaagtctttttcatcttgcttctgacctgagccacataggctggcttaatgccctgatcccagtggtcacgagccataatagcatttgccttctgtgaaatcaaggtcaatcgtttttgataagactcgtcctccaaggccagcttcaaagcctttgatggtgtcgcttgaaccacagataaatcaccgtagatatctgcctttaggacaagatttacctgcatatcataggaatgattgatatggagaacgaggtgaatcttcccgtcttccttcctaacagacaaagaatcgagttgataagattggataaccccagcctgactgagcgccagtctatccatattttccaaagaatcctgatagatataggaaatctcagggtcattgaccttctttaccaaagagtcatttcgctgtcgattgaaaaccacaagaccaagtatgaggattacagccagggcacttgccagatactgtaaaattactttcttcatagtacttccattatagcataggtggacaaaatattctgaaaacgattggcaaacgttgaaaacaaatgaaaaaacaggccgactaagacctgtttgaatgaattgtttataaatcgctcaagcgacgatgtttgatactaaaatcaaaataagcattttcctgaagtttgtggaatatgtctctgtaagctttttcgtcaaagtgatcgccacgatagagaatctcaaagctcaaaccctcatattccaaaaaggcattggaagtcttaaaaccattacgcttatagaaatcccaacgcgccgcacgttgctcaggattgtcgttaggttcatccaagcgctctacttccaagaccatagaacgcgatggtccataaaagtccaccagtttatcaataatctcacttccgtagccatgactccgcatttgaggtacgatggcgaagaagctcacataaaaaactttggcattgtagagaactgaggcaaatccaacaaaatcatcctcgtcataaaaggcaaagaaatgataatcatcacgaccatccaattttaagaagtcacttaatggaatacgttcttcttctggaaaagcctcgttatttaagcgctctaccctatctaattctggaaactctttggtaatcaattggctgcgtaaagccataaatttcccccctttttgatgcttatacctataggtcattataacatcttgataagcaagtgcaagtttcaagggctaagataagtctactggtaaactcctactgccgtgtataaatgctgcttggctgtctacgactcctctcttcttaaaaataaaagacaacgaccatttctagtcgttatcttttttgtgattcataagctattgcctattttttcaattcccaaatttctttagcatactctgtgatcgtatcatctgaagtgaatttgtgagatttagcaatattagctaagctcatacgtgcccacttgtcatgatcacgataaagcgcatcgattttctcttgagcttctacataagcagcgaagtcttccaagaggaagtactcatcgttgtgggtgatgagggcttcgtaaatttcagtaccttcagattgagcatttggaatcgtaccattaacaaaggtatcaacgacacgacgaatgactgggttattttcataaactgcacgagagtagtaatcgtgacgtgcatagtgttcataaacttcgtccttgtccataccgaagatgacaacattctcatcgccaacttcatccttgatttcaatgttggcaccatcaagtgttgccaaggtaatagcaccagtcatcatgaatttcatgtttgatgtaccagatgcttctttagaagccaatgagatttgctcagagacatctgctgctgggatgataagttctgcaagactgacacggtagttttcaaggaagaccactttaagtttcccttgaaggctttcatcattgttaacaaggttggcaacttcgttgatgagtttgataacagatttagcgaagtgataaccaggggcagctttggcaccaaagatgaatacacgaggtaccatgtctttatctggattatctttcagatcccaataaagtttgatgatgtgaagaaggttaagcaattgacgtttgtaagcgtgaagacgttttacttgaacatcaaagatagcatctgtagacacttctacacctgttgtttccttgatatagtctgccaaacgttgtttagcagtcttcttaacttgatagaactggttcaagacttccttgtcatccaagtaagttgtaagattttcaagctcatggatgtcgttacgccaaccgtcaccaatcacgtcatcaattgctgctgaaagttctggagctgcaatttgtgtccaacgacgttgaacgataccatttgtcttgttattgaatttttctggataaatagtatagaaatcgtgaagggtatcttctttaaggagttctgtgtggagtttggcaaccccgttaactgagtgaccaccaatgatagccaagttagccatgtggacttggttatccttaacgatacgtgtgcgttcaatgacatctgcagcaataccacgtccagccatttcagcgatgtaacggttgtcgatttccaagatgatttggtaaacacgtggaaggacacgtttgaagagctgttgatcccatttttcaagggcttcttgaagaatagtgtggttagtgtagctcatagttttaacagtcgcattccaagcatcttcccatgaaagaccatattcatcaaggaggagacgcatgaattcagctggtgcaaccgcagggtgcgtatcattgatgtgaacagatactttttcgtggatatctttcaatggcaagcccatcttgaggtaagatttaatgattgtttggagaccggcacttgtcatgaagtactcttgaaccaaacgcaattctttaccttcaatcgttgaatcatctggataaagaatagcagtaatatctttcacacgacgacgtgcatcaagcgtaggataatccaattcgtattcttcaggaatttctacatcccaaagacgaaggttgttaatcacaccattcttataaccaatttgcggcacatcataaggtacggcacgaaggacttgagcattcttataagttgggacaaagcgaccatcttcattgctttcaagaaccacatcaccaaagagtttcacatagacaatatcgtggtctttacgtgtttcccaaacattacctgtagaaccaaaccaaccatctggtaattccacttggtaaccatccacaatacgttgtttgaaaagtccgtaacggtaacgaagaccattaccaaaacctggataaccggtagtcgcaagtgaatccatgaaggcagcagccaaacgaccaagaccaccattaccaagggccatatcatgctcagcttctacaacttcacggaagtcaatatcaagttctgcgaatccctctttaacaaggtcaagaataccaaggttgagaaggttagtttccaacatacgacctggaagaaattcaatcgagaagtagtaagcaattttttcttgattgtctgaaagtgcatggttacgttcaatccatgtatttgtgtaatatttacggatcaaaccagccaaggctgtaaagatttctgttggtgtcgccttagcaactttaatcaactgctcttgatggagagtatctttaaagtcacggataaattgttcttttgttaaattttctagttgcatagaattcctttcttactacttctataccttggatccacctctaaaagagaataattaggataagggggattggaaatttttaactcccaaaccttgccagataagattcaaaacaaaggtttcaaaatctttttacaaaactgctaaagcagttaaattcattataacatgattagagttattcttctattcagatttttagatgttatctccataattgctttcaagcgaatcttaaagaactaaataagtatagaagcattttcaaactctttacatgaagataacttttccctcacgagaaaagttatctttggaactatactaattgtttgtacaaatcaacatatgccaaacttgctgtatcccatgagaagtcacgtgtcatcgcattgtgttgaagttgtttccaagcttcagcatgattttcgtagacatcgagagctttttcaagggtttgaaccatccagtaacctgagaagttaccaaatgagaagcctgtacctgagcctgtcacagggttgtatggttcaacagtatcacgaagaccaccaacctcgctaaccactggcaaggtaccatagcgcatagacatcatttgagagaggccacatggttcaaaggctgaaggcataaggaaaatgtcacaaccagcataaatttgttgagccaactctaggttgaaagtaatgttggcagacattttttctgggtaagcgtgaccgaaccaagagaaagaattctcatagtcgctgtaaccagtacccaaaagaacaatctgaacatcatgttgcaagatgttgtgaagttcgttgacaaccaaatcgaaacctttttggtcagtcaaacgtgacacaataccaatcaatggaacgtcttcacgaactgggagaccaacacgttcttgaagagctgccttgtctttggctttacctgacaaatcatccactgagaaatgataaggaatgtgagtatctgtttctggatcaaggaagtccgtatcgataccattaacaataccagacaacttaccagattccatgcgcatgatttgatcaagacctttaccaaattcaggtgtttgaatttcaccagcgtatgatggagaaactgttgttacacgatctgcgtaaagaacagctgctttcatccagttgaggcagtcattccaacggagcgtaccatcagcataacgctcgtaaccaacaccaaagatttcccaaagcataccactgtcaaattgaccttggaactcaatattatggatagtgaagactgtcttaataccttggtaagcttgaatccaatggtatttttccttaagaaggaatggaatcatggctgtgtggtagtcatgaacatggagaatatctggaataaagtccactttttccatcaactcaagggcagccatttggaagaaaccaaaacgctcaccatcatcccactcaccgtataccgtaccacggttgaaatactgttcattatcaatgaagaagaaggtcacaccatcacgtacaattttcttgatgccgacatattgacgacgccaaccaacatttgtatagaagaagccaaggtcttcaacctgatcgccaaacttagccgataccacatcataatatgggagaattacagcaacttcgtgaccatttttgactagagatttaggaagagcaccgataacgtcacccaaaccgccagtcttagcgaaaggtgcaccttcagcagctacaaataaaattttcatcgtacaatatcctctgttacaacgctaccttttttgatgacaactggattatcttctgtaccgcgaatagtaacaccttcagcgatttcaacacctttatccacaatcgcatactcaactgtagcgcctttaccaactgtaacacgtgggaagagaactgagtagctcacgcttgaaccctctgccaaatctacattacgtgaaaccactgagtgttccactttaccacgtacaatagaacctgatgcaaactgagacactttaacttcagaagaagctgcatagtatgttggctcttcatttttaacttttgtataaactttttggtttggtgcaaaaagtttatagaatttttctgattccaacatatccaagttagcatcaaagtatgctttaactgagtgaatatttgaaaggtaaccagtgtattcgtaggcaaaaccattttcagcaactgccaaatcacgaagcacataacgaagtttacgtggttcttctttagctgcttcttcttccaatttttcaatcaaatatggagtatccacaacgaagatgtctgttgacatgttgtaggcttctttgtctccaccttggaagagctcatggctaagcactttgtcagattcatcaatttctaaaacactgtttacatctgagatttgttctttaggaagttttttgtagacaacagtaattttttgtcttgttgaattgtgaaggtgcaagacttggttaagatcaatgttgaccaaaacatcactgttaagcgctaccgtttggtctgaccctgaacgtttaaggtaagtcaagatttgactatagtattctttatcaaccgttgaactttcaactggggtgttgtaaataccaaggtagtagtggctgaggagtgttgacaagccccactcacgacctgaacgaatgtggtcgaagacagaactgatgttttcgttttggaagataccgaagacgctacggataccagcgttagccaagttagacaatgggaagtcgatgaggcgatattttccaccaaatggtaggctggcaataggacggtgttcagtcaaaccatccatgtcatggaaccctacggtatttcctagaattgcagaatatttatcaatcttcatcttttggtacccccactacttcattgtatcctacgacttgcacttcttctgtaccgtcaatttccacaccatcggaaacgtgtgccccttcaccgataatagcacgtttaatttttgcgcctttaccaataactgcaccactcataatcactgaatcttcaacgactgccccctcacgaatttgtgtatttgttgcaagcacagaatgtttaacagttccatcaaccaaacaaccatcaacaacaagtgaatcttcaacatgagcatgctcacccaagaagtttggtggagcaatcatgttacgtgaataaattttccattgacggttacggctatccaaagcattttcaggagagatatactccatatttgcttcccaaagggattcgatagtacctacgtctttccaatagccttcaaattcataagcaaagacgctttcacctgtttcaagataagctgggataacgttcttaccaaagtctgacatatcaactgcgctcttttcagctgaaactaacatattgcgaagacgtttccagtcaaagatgtaaatacccattgatgctttcgtagatttaggattttcaggtttttcttcgaactcaacaatacggttattagcatcagtgttcatgataccgaaacggctagcttccttaagtggcacatcaagaacggcgacagtaagacttgcgttgttgtccttgtgagattggagcatatcgtcatagtccatcttgtaaatatggtcaccagataaaatcaaaacatattcaggattgatgctatcgatatagtcaatgttttgataaatagcgtggctagtaccttcaaaccaacgattaccttcactagctgagtaaggttgaagaattgatacaccagaattaacaccatccaagccccaacttgaaccattaccgatatgattgttcaaagcaagtggctgatactgtgtaatgacaccaacattgttaatccctgaattggcacagtttgacaaaccaaagtcaataatacgatagcgtccaccaaattgaacagctggtttggcaatactttgggtcaattttccaagacgagttccttgcccgccagcaaggatcaaagccaacatttcatttttcatgaatagtccccctcatgatttttagttccatcctcaaaaggatgtgagataatcagtcgaaactgattatgacaattaaagtaagttcctcagtgtggcaatagtttgggcatcaaacagcttctttcaaccgtgacttccctgctatcaccactgaaaaacaaatcgtgtacacgtttaagtctaccctttatttcaagcgacgttttacacgccagatacttgctcctagagcaggtagggtgaagctaagggtattttcatagtccttccacttcgccttttgggtacgggtttcaggatttccttctttccagacaccaccgaactcttccatctcagtgttaagcacttcttggtagataccagctactggcaatccaattgtgaagttttgtcgttccactggagctaggttgaagacacagacgaggaagtcacccttatcgcctttgtcatccttacgaatgaaggaaagaacactttcagcgcggttatccgcatcgataatttcaataccatcgtaagaatcatcaatttgccagagagatttatggtccttgtagaaagcattcatatggctagtaaaggcctgcatcttctggttcatctcatcttcaagattaccccattcgagttgataatcaaacttccactccaagaattgaccaaactcagaacccatgaagagcaatttcttacctgggtgacagagttggtaagcatagaggttacgaagaccagcaaactgattatagcggtcaccccacatcttatgcatcatgctcttcttaccatgaaccacttcatcatgtgagaaaggtagaacatagttttcattgaagcaatacatgaaactgaaggtcatcagattgaagtcatactgacggtaaactggatcttctgcgtagaatttgaggatatcgttcatccaacccatattccatttgaagtcgaaacctagaccaccttcttcaatcggttgtgtgattggcgttgccgcagttgattcttccgcaatcatcatgacatctggataacggtttttaatttcacgattgagcttttgaaggaagccgtaaccttccaagttacgattaccaccatccttattaggcatccatggaccttcatcatagtccaaatagagcatgttagatactgcatccactcggataccatcgatatgataattttcaatccagtaaagagcacttgaaataaggaaagactgaacttgattttttcctaagtcaaagttaagtgcgccccaacgatagttatgagctcgatcatgatcctgatattcgaaagttggtgtaccatcgaagtaggccaaagcatcgtcattctgtgtatagtgacctgggacccagtctaccaagacaccgatattattctggtgacatgcttctacgaaatcttgaaattcttctggtgtgccataggtatgctcaaaagcaaagtaacccataagctggtaaccccaactcatcccaagaggatgagccatgagtggcatgaattccacgtgggtatagttcatctcaaccaaatatggaatcaactcttctttcaattctttgaaagtataaggttgaccatcctcttttagtttccaagatgatgcatgagcttcatagatattaaccggacgtttttggaaaccaaagcgtttacgacgacccatccaaaggccatccttccacttcttagttttcttcttacgaatcacagctcctgttccaggacgaggctctaagtaagtcgcaaaaggatccatcttttcgacgacttgacctcccttacgtttcaccaagaacttatagagttgtccttcttgagggagagctgaagttgcctcccaaacaccgatatggtttttggtcatatccagaggttcatcaaaccaacctgtgaaatctccaattacctgaatctgctcagcatgaggggcccacacacggaagataaaaccttcttctccctctaattcatgcacacccaaataattctgaaggtggaagttctcacctgttccaaatgtgtacatggcttcatcgagattcataccatcactcctttcttaaactagccttgatagttctaactatcaagaaattaaaacattgaaatatatgcaaatacactagaaaacccttcagaccgatagggcttacaagtaaacaaaaccacttatgtaagcgtttactgtattataacattttttgatattcttgtcagtaaatctccaaatcttttttcatattgttgaataccaaagtttcacgtaattttcctgagatgtgcaattcaacaatacctgaatcgtactccgcttttgcgacatagaggttatcgtaaatatctgcatatgaacgatatgaaaattcttgtacggtttgcttacgctcaattaatttggcaactttagcaaccaagtctttcttaagagtcacttgattccaatccacctgattaacctcatcaggggcattgtagctattcatggcacgcttaacatctgcttccgtgtaattgccatcttcgcctgtagcaaccatcttagtgcgctggaattcttgtcccaattgcatgaaacacattccctgcatagtcagattgagggcattagccaagtagatacgtttttcaatatcctctggcgaatcatgtggatgcaaatgatgcatcaaatcattcaaattgtagttgtcatgcgcttcgatatagttgaggacctgacctggcatgaggtagtttacaaaaccacggcttccaagcagactcttggcaatctggtcttccaatggtgctccagacacatagccattactgatgtgtccatagacctctgctcccttgaccgcgtcacgcgcattgtcattgaaaaatccgattctaggcatcaaggctgcattatccttcttgcccttttggtctacaggaagtccaattcccatgtcccatccttcaccataaagaagaatcctagaatcaatatcatccatagccgaacgaatagcattcatcgtagcaacatcatgcaagcccatgaggtcaaaacggaaaccatccactccaaattcttctgcccaataggttaaggaatcaatcatatacttacggtacatttccttttcactggctgtttcatttccacaacctgatccatcttggaaagacccattgtcatgcatacggtagtaataagccggcacagatagttggaaaggagagctgtaagatgagtaagtatggttataaaccacatccatgataacccccattcctgcctcatggtaggcctgaatcattttcttaagctctaaaattggtgccacgggattcttttgatcagcagcaaactgacgatccggaacattgtaattttcaggatcgtacccccagttgtagagaagcttcccacctttatcgtaggttttatggtgatcaaagaccggttgcagttggacatagttgtagcccatacgtttgaggtaatcaaaacaagtcacatctccatgggcatttctagtccctttctgacaagcacctagataggttcctctataggacttcttaaccccagacgtctctgaaatcgagaagtcacggaggtgcatttcacagattacggatgagcaagcatttgccttacgccagctcgctttttgcttagtaaccttttcataccctcttgggacaagtctcttaggattgaccaccaaactttttttattatctaagctaagggcaatactgtaggggtctcttgtatcctgatagaagctttcctcatgatacacacgaaattggtaggctaccccatccaaatcctttttgacagtggcactccaaacaccgtgagtattcatctcatgacggtccttattgatactggttcctcggctcatcttaatgatcttagggtttttactgccctttttaaaaagcaagagcttcacacgacgagctagaggtgaccaaaggcgaaactctgtagcccctttttcatacttatgacctaaccaaccttgaaagccccacttctgatcaaattcctgtctacgaagtgccatatcaaaggcatgctggtcacgaccttcgaaactatggctagtcaaggctgcctgtttagaataataaacagttggatcaccttcaactatccaaatagcattgggagcatcccctaggaagcgtcggacacggtaatcatgtgtttgcctcgaccagtcttccgttttgaccaaaagattgacagaatcaataaaacgattggagggagaagtaacctgaccaacaaggccaaaatcatcctcacgtgaaaaatgggcttcttcgccccaataaccatctagccacttccacatactgtatctggaatagtcgccatgcatactatgaaaatgaacggttaataaattgtccattttttactccttagtttttgttactcactttttctcctattatagcaaaaaatgttcgttttgtaagcgttcttatggaatattttgcaattttttggtctattttgaacataaaaaaaagaatgagaaaataaatagcaaaacactcatttttctcatttcttttgtctattttaattcttttaaaaaccaggcttgagactctttccagttcattattcttgagtcatcaaaaccttacgtggtttggtaccttcagctggtccgataacgcctgcttcttccaactcttccatcaaacgagtggcacggttgaaaccaactgacagacgacgttgaatcatggaagcacttgctttttgtgtttcaaggaccaaagccttggcctcttcaaagagtgggtcaccttctgagctaccaccattggcagaggaacctccaccaaaatcattttcagaaacttcaccaggatcaaagctctcatcatagtcagctgaagcctgatccttgataaaggtcacaatacgttccacgtcatcatcagagatgaaggaaccttgtagacgaacagggtggttctcatcaatcggtttgaaaagcatatccccacgtccgagtagcttttctgccccattttcatctaaaatggtacgactatctgttcccgaagacacggcgaaggccacacgagatggcacattggccttaatcaaaccagagataacatcaaccgacggacgttgagtggcgagaatcatgtgaattcccgcagcacgcgctttttgtcctagacgaatgatggcatcttccacttccttactggctaccatcatcaagtcagccaactcatcgacgataaccacaattaaaggtaaaggaatctgtttctcttgcgattgggcattccaatcttcaaccttggcattatagccggcgatattacgcacaccaaacttactaaagagttcgtaacgattctccatctcatctaccactttttgaagagccttggcggccttacgtggattggttaccacagggataaggagatggggaatatcattgtaaactgaaagttcaaccatctttggatcgaccatgaggaacttaacctggtctggacgtgccttcataagaatactagagataataccgttaaccgcaaccgatttacctgaacctgtagatccagccaccagcaagtgaggcatccgacccaaatcaaagctacgtgctgagccgtcgactgccttaccgagaggaacttccaagagtttattaggatccgtcttggactgttcccaaagctcacggaaggatacggtcgcaatctcagaattaggcacttcgataccgaccaaagatttccctggaataggtgcctcgatacggacatcttttgcagctagagccagagctaagtcatcagctaggttggaaatgcgattgaccctgaccccaacagcgggcttgacctcgtacttggtcacagacggtccaatttcagcccgttcaaccttaacatcaatgttgaaactcttgaaggtatcctcaaggatacgtatatttttacgaacaatgtttttctctttagattgactcttaggcttgtcaggtgcaaagagatcaatagtagggagcttatactgcaggagttccttaggtgtgaaatcaacttcgacaggtgcatcatccccctcaactaccatagactgaggaaattcctcacttggcaaatcctctggataaggtgcataatcttcttgaaaatctccgtaatcctctggaggaagactgtcataatagtcctcagagctataagcactgatttcaggctcagctgcaaaaatctctgcttcctgtggcaaggcctctgcggcatcctccaagatttctcctgtctcctcatcgacagtcaaatcagccagacgctcggactcggcacgttcttctgcttcacgttctttctgagcctgacgttctgccttcttctcctgacgttgagccgtccgttccaaacgcttctcagcccctttctgccaagcttccttagcatactccatgatatccaagacaacccaagggctaagaatgaaagcacccaagaaaataatcaataccccaatcatgaagctaccaatatttgaaaagaggaaggaaataggctgatacaaaagagcccctagcatgccaccacccgcgaaacgagcgacttgcacactcacaagttccccaaaaagtaagtccttggtaccagggaaaatatccagaccgctcatacgatctaaactaaagagataagcgtgaaactccaacaagagccccgcaaagaccatccaaaatcctgtgacatagttactgtgtttacgtaaccatttaaagccaaagagataaacatagatagcaaaaattaaagggtaagccatactccccacaaatacgcgaaagagattatagagggtaaccccaaagaaacccaatcgaaagactgggaaaattaagacaaaggcaaaaaagaaggtccatagcattcgcttaatcgccttctgtctgtctaattctgcttttgtaagacgcttcttaccgttcttagaagccgccccttttttcgtttttttcgttgtagccataggtgtattataccacgtttttatacatgaaaaaagagagacaaatctctcctgtgattaaagacaaagtcttcatttgacattattcttcaattaatgatgttgagtggactggacgattcttaccgtctggatcaatatattggatagcttggttgatagcaattggggcttcacccattcccacagcaatcaagtcaatcttaccttcatatgctgctgcatcaccgatagcataaacaccctcttgtgaggtttcaaattgggcattaacagtaacgctagaacgtttatagtcaacgttccagttacgaaggttcttgttgttagttgaaaaaccaaagctaacgatgagggcatcaagtggcaattccacaacctcatctgacttcactttttgaacagtcaaactttgggcaaaaccattttcacccttgatttcaagtggcacataaggtgtcatcacattaactgatgattgatgaagaagctccacactgtgctcgtgggcacggaaggcgtcacgacggtgaatcaaagtcacactttcagcaatgccatccaagtgatttgcccagtcaacggctgaatccccaccaccagcaatcacaaccttcttgccagcaaattgatcgagactatgcacattatagaacaagttattatccgcataatcatcctcattgtccacacccaaaggacgtggggcgaaggcaccatttccacaggcaatgacgatagccttagacaagtgttgacccttgctagtagcaattgtgaagatgccatctgtcttttcaaaggtttgaacttcctctttcaaatgaatgctgacacgatcttcaaaacgcttaagctgagtcaagaggttttctgtcaattccgcacctgttgtttgaggaaaggctggaatatcgtagatttttttctcagggtagagaatggcaggctgtccaccaagctctgacagactctcaataatattaacagtcatgccacgtagaccggcataaaaggcagcccaaagtcctactggtccaccaccaataatggtaatatcataaatcttttcttctgacattttattttccttctgcttttatctcttctaaaatctgacgttcttcatccgtaaaatcatagttttccaaaagatctggccgacgctcccaggtcttacgcaaactctgctccatacgccaacgtcgaatattgacatggtggcctgacaagagcacatctggcaccttcatgccacgaaactcagctgggcgagtatactgtggaaactccaagagccctgatgagaaactatcatccttatgactagcttccttacccaaaacctcaggaatcaagcggacagtagcatctacaatagtcatagcagctagctctcccccagtcaagacaaagtctcccaaggaaatctcgtctgtcaccaaagttttgatgcgctcatcatagccctcataatggccacaaataaagaccaattcctcttcttgcgccaattcttctgcataggcctgatcaaaggtacgaccagcaggatctaagagaataacgcgaggcttagtgacatttagcttgtcaaaggtatcaaaaattggctgggcacgaagcaacatgccttgtccgccaccgtaaggttcgtcatctacatgacgagccttctccgcattttcacggaaattgtgatagttgatttctagaagccccttatcctttgccttaccgacaatggaatgctctaagggagcaaacatatctggaaatagggtcaagatatcaatcttcatcgtccaatccttccatgagctcaacctcaatacgaccagctgcaacatcaacatcaagaactacaggtgggatatatggcaagagcaaatctttcttgcctttacgttttactacccaaacatcattagcacccggttggagaatctctttgacctgaccaatcaaagtatcaccttcataaacatcaaggcctatgatctcatggtagtaaaattccccgtcatcaaggtctgttagattttcctcagcaatcttaaggctacaacctttatacttctctacatcattgatatggtaaagtcctttaaacttaacgatatcaaagtttttatgcttacggtgactcgcaatctcgacatccatgatgtaattatctttgtcatcaaaaagggctaggacactcttcttcttaaaacgctcatccgcaaaatctgttacagacaaaacacgaagttcaccctgtaagccctgtgtatttacaatctttccaacgttatagtatgtcattgcatttccttattatctgttttcttattcaaataaaaccacgactcgaccaagggcttatcatcatatgacagccatcacaaaacaaagttttttcttcgagtcgaggtctcgttatttatgattttaaagtggtataaaatgtctgacctaggccagtcaacccctctattttatcaaaaaggacacaaaaaaaccagctttctctagctggtacttatagtccgtacgggattcgaacccgtgttaccgccgtgaaaaggcggtgtcttaaccccttgaccaacggaccataatctgtgtctctaccctcaggtagaactggggtagctggattcgaaccaacgcatgagggagtcaaagtcccttgccttaccgcttggctataccccaaaagactcttattattctacagaaaaactagtaggctgtcaacacttttttaaaacttttttttaaaaaagcaaccggaaataccgattgctaggagttaggagatttcatcatctaagcgaacttagatagatgatatgaggtcgcttcaacctcatatgaaaaaagaaaagttttaggatggtttaattatatgttttgctagaaataaagtcaaagaatttgactcgcaaaatccgacttagggttaagagttatgatccccctccctgacccctagataacaagcttagttgatagctttattcatcatcctgcgaaaccaaatgatgtctaaaagcataaacgacagcctgagtacggtcatcaacattgagttttccaaggatattagacacgtgagttttaacggttttcaacgaaataaatagctcattagcaatggtttgattgtcataccccttagccaaaagggccaagatatcacgttcacgtgccgtcaagtcatcgtgtaagtccggatgactatcatggtatttaatcttattgtccacctcagtttcgatagcttcttcaccacggtaaaccttacggatactattgagaatctctgccgcactactagttttaagcatatagcctttagcaccagcttcaatgactgggtaaattttttcattgtccaaatagctagtcaaaaccaaaatcttggcttcaggccattctttgagcaattccaaagtcgcttgaacaccatctaattcaggcatgacaagatccataacgacgacatccggacgcagttccaaggcaagatcgacaccctctcgaccattccctgcctctccaactacttctatatctccttggagattcaagaaactcttaaggcccaaacggaccatctcatggtcatcgaccaaaatcacattaatcttattcgacattgtcttctcctcttaatatcggcacacggacatcaatagacgtccccttacctttagcagataggaactgcacagttcctgccatttcatcgacacgctcttggatatttttcaagccataactcatctcgtcagtcgaagcatttaagtcataaccaacaccattatccaacattttcaattgaatttcctgactattttgatagaggtaaacctctatctggctagccttggcgtgtttaagggtattagagataaactcttgggcaatcctaaagagattattttcaatacgcttgggcactttcttaaccatatccttgtagacgacatggatattggatttatcggttaattccttaagaatcatctgcaaaccttcttgcaaggtcttgttctcaagctctgtcgggcgaagatgcaaaagtaagacacgcatatcattctgagcgtccgtcagcatggcctcaaccgcctggatctgattatgcaaatcttccttacttagctggtccgccatctgagagacaccagataggatcatactagccgcaaaaagctcctgactaacggtatcgtgaaggtcacgagcaatacgtccgcgctccttcttgataatatcacggctttgtagagcttgggcattctcagttttctgcaagtccttagtcaatttacgcatcttatgagacaagcgcatcatatttttgtctaactcaatatctccctgacgtttgactggttgattattgataatgcggcgcaaatcctgattgactgaacgcatactgttatcattggcaatggcccagagaatataaagcaaaatgagcaaactcagaaccacaaaaaccatgttaaaaaggaagtggaaggcctgagacagattgccgaaaaccagtgaaaagttgaggttaaagctatccatcactacaagggtaacaccaaccaaaactacaaccgaataaatcaggattaaaaataggtactgtttcttcatttgcgacgtacctccactggtccagctcccacattgagaatcaatttaaccgtccgatgggcatgctcatactctgccccctgcaaggtcaagctttcataacggagatcgtattcatcttcattaaagaaggtgacagagctatagattgccgatatgttgagtttaacggaaacatcaattggtaccaagatagtcgtcggtccatagagtttctgcaaaatcacgacattatctcgccccgagatgataacctgggtcaaatcaatcacatctgtcccaaagaaacggatgatattgatatcatcaaagtcataacgatcactgacaggttccattcgagtcccaatccactggtttcgcacagcctgaggatccaagtcgtcttccttgaattgaatgagagcgtaacgattctttttcttgacctgtgaaaaatggttaatcatgacataggccacacccaccaaaatagcaagaaccacatagatattccacatggaaaccagaaaaagtgatatcaaactgatagtcaaaacaaagtcactcttggattccttgttaaaaaagcgaacggccaacaaggtcaagaccaaaatgaaaataaaactggtaatatcattattaaagatggtaatcaggcccagagtcaaaagcagggcttccaccactaagaaaaaattaaatttggtcataaggacctctcaaataaaagtatacagggttcattctatcaaattttaaggcaattgacaaaaagacccagtttgagcaccgactaaccaagatagaaaaggggcagcagaattcaaaaaaagtgcctccattataggaaacactgtctttcattcaaaaatcttaatcgtcagtttcgtccattttactatttatgagttgcaccgtacttctgatttcctccagtatgacacgctgctctgccaactccttctcaatctcagctaatttccgttcagtctgacgacctgaccgcacaaaaatattattgagtgagctggttaataaccctagagtggcaatcccactaaacataagaacaaccgcaacggccttacctaccaatgttcgaggaacgatatctccataacctaccgtagtaactgttgctacagaccaccaaatagcatctataaaattatggtgctctactctagcaataatagcactactgataaggatgataatgctattaaccgaaagcagaaaataaaagccatttctgcgattaatgcgattggaaatgtgcttgagcttactactcaaaccaattaagcgagagagtttggccaaacgagcaaagcgtcccacccttgaaaaacggaggaaggtaaagacttcattgtagggaataatagccaacaagtctaatacatgcgttttaacaaaaattcgcttacgaggtgccaaggagaaacgaatcgcataatcaatggcaaagatgagcgttatagactgatctatcactctgaaaggtcgccttccaattgaaattaatccaaccaaatcaaagataaccaagccaatggaaatcagggccaggaccgtcatgacgatatcgtaggtaatgatataccttctcagttttctacggtttctcatagcgtctctcctatatgtgatgtcttcattataaaagaatctctgacccctggcaagcaggctttttaagctatcgacaagaagtctagataacaaaaaagagagatgaaataacctctctttttttgttatcttagttatttaaaactactgtagctctgtgtgagtagcctctgtcgaggtttcagtgcttgaagttgtactgtcagtacttgagctcgtcgatgacgaatgtgtcgtactgcttgagcttgactgtagacttgaacttgctgttgcaactgaaacatagagaatcactgtaccatcaacacttgtaccagcttgtggatcttgataaaggacctctgtactgctaggaaccttatccttatctaacttggcaccagtattatagtcgtggtactcgatgctactacttgagatactcttacgattcaaggtttgaaccgctgttgaaaccgttaaaccagtcacatcaggcatggtgacggtcttaggagttgccacacggaacttaatcttagccttactatccttaggattgaaagacttgtttttccctggactttgagataggatttctccctcttcagcactgtcgtcttcgacatgctgaatatcaatttggtcctcagaaacgccataattcgaagttaagtcctcaatggcatccttataatttttacctttgtagtctttcaaagcgaaacctttaccaccagaagaaacatagacatcaatgcttgatccttcttttcgtgtagttccagctgtaggatcagtcttgatgaccttgcctgtatcaacagagtcatcttccacttctttaacttctcctaccttaaatccagcaccctcaattttagtctgagctgtggacaactcttggccgaccacattaggcacctggacattatcaggattggtaaataccaaataggcaaagatgataataccaataaagacaagtcctaggaaaaccttgagtaaagttgagaagaaattcttctttttcttcttagctggtgtcgttttcttcctcggttgtttacttggagcaggtgtaggctctgatggctcagcagcaacggcctttttctcaaggcttgctgatggaactggatcaacctttggcaaggtcttggtatccgtcatatcatcaaagactaccttggcatcgcgtcgatgactaggatgcaaactcgttaccaagtcacggctcatttccaaagtactattataacgattttctagttttttggctgttgctcgaataaccacgttttccaaggcttggggaacgttacggttctctgccaaaatcgatgggagtggcttttggaaatgttggagtgcaatggttaccgcactatcgccatcgtaaggaatatgacctgttaacatttcaaaaagcataatacccatagcatagatgtcgctttggatagttgctttcgatccacgagcctgctctggtgagaggtagtggacagaccccaacatagagttagtttgagttagactagtctctgcaaaggcaaccgcaattccgaagtctgtaaccttggctgtaccgtccttagttaaaagaacgttttgtggcttaaggtcacggtggataatgcccttttgatgggcaagagtcatggcggaaagaacctcccccatgatacgcacaacatcttggttagaaagtggcgcatggtcttgaatatatttcttcaagtccgaaccatctacatactccatcaccaaaaactgctggccgtcttcttcgccaatatctcggatagcaacgatattaggatgactgagttctgccatggcacgcgcttcacgctggaaacgcgccacagccacctgatccgtttgataattggtacgtagcaccttaatagctactctttcattatccagaatcaggtcgttagccagataaacatccgccataccaccacgcccgatagacttaaggattcgataacgtccagcaaacaatttgccaacttggatcattatccttcctcactttctattttgatgagagcaacggtaatattatcatgaccaccagcctcattggctgcagctaccaaacgactcgttttttcttcgacgaaaccagggctgttgacaatatgaacaatctgttcaactgaaatcatattggtcaaaccatctgaattagccaaaatatagtctcctggttccaattgttggacaccaaggtcagcctcaatcggagcagcttgcccaatagattgcgtaatgatattacgttgtgggtgaaccgctgcttcttcttcggtcaactgaccagccttgataagagcattgaccaaagagtggtcattcgtcaattgcttatactcaccattacggataagggcaatacgtgaatccccaacatgggcgaaaatcacagcattatcaacaaaggcaagaacctcgatagttgttcccattcccttatattcttcgttttggccaagttcatagattttacgattttctgcatcaatggcagcaatcatccaatcacgaatttgactcaactcacgaaaatcagtgttaatccagtcacgaccaaggtcagtcactgacatctcactggcaatatttccagcacggtgtccacccattccatctgcaacaacgacaagggtaacaccagcttggttgacaaatttattaacaaaatcttggttgtttgaccgtttttggccaatgtccgttaataatgatatttccatagttttctttctgacttgcgtcagcatttcctcctctgtaaccctaagcttttttacgcaactgtgcgatgaaaaaaccatcagttagatactgttcgggggtaattgccaaacagccattgaccacgatgtctttgcatggatggtctaaggcaacttgctcaaaatcaggatggctctcaagaaaggcttgaatcacctcttgattttcttctgctatgatggtgcaagtactatatgttattataccaccttttcgtagggtttgacaaacgctggataggatatccaactgcacagccttaagggactcaaagtcttggagatccttgttatatttgatgtcgggtttccgacgaatgagcccaatccctgaacaaggagcatccactaaaatcttgtcaaaactatcagccggaaagacttgatgtacctgactagcatccagtttctgtgtcttaaccttatcagctaggccaagacgttgggcattttcttcgataagggcaagcttatgatcatagagatcaagcgccgtcacatgtccactcgtcaaataagaggccatatgtaccgtcttaccaccaggtgccgcacaggcatccaggatttcttcttcaccttgaatccctaaagttggcgcaaccagttgactggtctcatcctgaatggtcaacaagccctctttaaaataatctgttccagcaaagtaaccggaagacttaacaagcccgactggtgataggactgaacgctcagccccagtggcctcctctatctcttccaaacgtgacgcatccgttacacgcacactagccttatttctcacaaagaggctttggaaaatagcaagggcacggtcttccccgtactggtcgataagttttttaaccaaccatacaggtagagaatactgaacggaatagcgtttattgacacgtttaatctggcttggatctggcaaaggctggctagatagtttacgaagaaccgcatttaccagcttctcagcaccctttttattgccacgatttttggcaatagcaacagcatcgttaactactgcatgggctggaatcttatctaaataggctagctgatagagacttaagagcaagaggtcataaacccaaggttcaagcttatcacggtcctcaataacatgggctagaatccactccaaagtaatcttatgagccacggtcccatagacaatctccgtcactaaggccttgtccttatctgtcagctgcgacttgctcagatgtgcattgagagcaatatttgagtaagccccttcctggaagacttcttctaagacttcgagtgcctgtccacgagctgtttttttccaatcattggccaaatgcatcacctacttcaagattgcgtccgaccccattaaggaaatcagcaatagccatacgaggttttccagcaggttgaactgtcttaagcgaaatagctccttggccagtcgcaactaccaaactcttcttggttttttcaataatatgaccagcctgtccttgaccttctgccaaatccgcttcataaattttgaaacgtttgccatcaagcaaggtatgggccacaggccatgggtacataccacggatttgattgaagatgtcacgagccggcttattccaatcaaggcgctcctcttctgggctaatatttggcgaaaatgttacctgactggcatcttgaggaacaggtttgatttccccagcgatataggcaggcaaggtttcaagcaagaggtcacgccccaagactgccaatttttcaaacatggtaccaacattatcctcgtcaagaattggcaaggccttttggctaaccatgtcaccagcatccatttccttgaccatttccatgattgtcacacccgcttctgcatcaccattgataatggcataatgaataggtgctccaccacgatatttgggcaggagtgaagcgtggacattcactgcaaaatccatgctatcaagtaacttgcttggcaaaaattgtccataagccgcagtaacaatcccatcagcaccaagtgccataagctgtgccatttcttcagaacctgacaacttttcaggttgataaattggcaagtcatgcgccaaggctacttccttgaccggtgtcatgcggatttcttttttacggccaacagcacggtctggttgcgtcaccacagcgacaatatcataatgctcatcggtcaaaagtccttccagcactgtcgctgaaaaggcaggcgttcccataaatactaattttgtcatattcttccttttctagattaggtaaaattctgaggttcgtgatcaataatcaaacgcaggtccttgttctcaggctcctgagtcatgtcaaggaccctattaagcgtttcttccaagttatcctcaaaacggtatttgataataatctgatagtgataaaggttatgtgttcgggcaattggcttaggcgtaggccctaggaaggtcaccttgtctgacaggtgctctcttaaataagccataacctcatagctcttgcgaactacaaactcttcatccttgtgagaaagcgtaattcctaccgtatagaaataagggggataggccaactgacgtcgaatccccatttcataggcgtagaaaccttcataatcctgttgctgtgcaaaccgaatggcataatgactaggattataggtttgaataataacttccccttccttgtcagcacgaccagcacgaccagccacctgagtcaacagttggaaggtacgctcagctgaacgaaaatctggtaaatttagcgacgtatctgcattcaagacccctaccaaggtaacatttggaaaatccaagcccttggcaatcatctgagttccaagcaaaatgtcagccttaccacttccaaaggcctccaagagtttctcgtgagcccctttcttgcgtgtcgtatcaacatccatacgaatcactttggcttctggcaaaagttccgtcaattggtcataagccttctgtgtcccagtcccataatagcgaatctgacggctctgacagttagggcagacatgtggtattgctttttgaaaatcacaatagtggcaattcatggtcttggtatccatgtgcaaggtcagtgaaatatcacaattcggacaatcatccacatagccacagtcacgacacatgacaaaagaggaatacccacgacggttcaacatcaatacgacttgttccttacgtgccaaacgttccctgattttttccaaaagaggtggtgtaaaatcactcgcctcttgacggcccacaaaatccttgaagtccaccacttccacctgcggaattttagcattaggattagccctttgtgtcaactcaagaaaatggtaaacccctttctgagctctcgcccgtgtctcaatagagggtgttgccgacccaaggacaagcacagctccatgactcttagccctaagcaaggcaacatctctagcatgatagcgaggattggactcttgtttataagtagcctcatgttcctcatcgataatgattgccccgatattgtccaaaggagcaaagatagccgaacgcgctcctaccacaaccttggcctgaccagatttaaccttacgccactcgtcaaatttctcaccgtctgacaagcctgaatgcataatcgccaccaagtcaccaaaacgtgaaatgaagcgattggtcatttggggtgttagggaaatctctggcaccaagacaatggcggtttttctcatagccagggtcctctcgataagatgcaggtagacctcggtcttacctgatcccgtcactccttccaataagaaaggtttgccaccttgtccaatttggcacatcatttcttcaaccgcatgcgcctgttgggcattaagctcaagaaaatctgtcttttctaccttttcaaagtagctatcggcacgattgacctcaacttcggtgataaccaaggcaccagcttcaatgaaaaacttaaccacatctcgtgaaaaaagcttgtggagatccgtcaacttgccagactcactcttttctagcaagaagtctcgcaactccaatcgtttcttagccctttgcgaaatagccaaagtctcgagaatacccttttgaacactatagtgcttctcagtcttgatattctgcttatctttagcaaggtaatcaaccgttacacgcccagactggaccagacgaggaatggcttgacgttgtacctctgacaactgcgagaaaagaatatgattctgcccttgaaggagagtctctttttcctcttcacccagtttatcagttgccatgataaccttatcgtactgcgaattaaggagaccaggtagcattgacttcaagatggaaatcttataagaaaagaccgtatgtcgcatctgatcagccaaatccagctgttcctgattaagcactggctcataatctaaaagctcagcgatgggttttagttcaggaaaatctcttaaattttcctgctcttccaagccaataataaaaccttgaagtaaacgatttcctttaccaaaaggcacatgaacccgcataccgatggcgatttgttcttgcatggcttccggaaccaggtaactataaggtctgtccgtctgcatcagaggaacgtcgacaataatatgtgctactaaaaccataaatctcctcctgtcacttccttaagaccagtatcttccaagctcaagaaaatatgagctgcctattatcgtcataaagaaggaagctgagacactatgcctcagctcccctctcctcataaaccaaagcaagactttgattttagattttatcgccttcttctttttctttagcgatttgttctttgattttacgttcttcttcctcagcagcaagacgtgcttgaatcactttcaaacgtgccaattcacgtttagattctggatctgggtggatagtcacattaccagattcaatctcttcaagggcttgaagggttggttttactgacgtaaactcttgagttggttcagcaccagcggctaattcatgggcacgtttggcttgcaaaataaccaatgaatattttgaaggcactttatccaaaagtttgtcaatagagggtttcaacatcataattctatacctatttctaatttatttatctgataatttcttttctgaaatcatattacgatagcgaccaatcacacggtcaactcggaagtgttctgcttcaataacacgtttgacacgctcagcagccaaaggcacttcatcattaacaatggcataatcgtattcgctcatgagagcaatttcttcacgcgcacgctcgatacgttgagcaataacttcctcagaatctgtcccacgaccaaccaaacgttcttgaagctcgttcaagtctggtggtgtcaaaaagatgaagacagcatctgggacctttttcttaacctgaagggcaccttgaacctcgatttcaaggaaaacatcaatacccttatccaaggtttcattaacataagtcaaaggtgttccgtagtagttacccacatactcagcatattccaacatttgaccattacgaataagctcttcaaattcctcacgcgaacggaagaaataatccttcccatcaacttcaccaggacgttgagcacgtgtggtcattgatactgaatattcaaatttgtggtcaggtgttgaaaaaatctcctgacgaacagttccttttccgacaccagaaggccctgaaaaaacaatcaaaagtccacgttcagacatgtcttctccttaaactaagattaaaaatcttcttatgactcacctttaaaaaagagaaaacaatcatctctttttttggcttaggggttgttcagtgattaagttacagctcacttttcagagcatgtgtttttccttactattttaccaataaaagcgacttttttcaaggtgaggacaccattaaaaagagtgaattccttttctcagtactcactcttttttaaatactcttttaaaccaaaccagtcaagagaccttgcatgaattcttctgaatggaactcaccaatatcatcaattttctcaccaaaaccaattaacttaactggaatatccaactcttggcgaatggctaaaaccaccccacccttggcactaccatccaacttagtcaagacaagacctgtaagaggtgtaatttttgaaaattccttagcctgactaagggcattttgacctgttgaggcatccaaggccaagagggtttcatgaggtgcttctggaaccacacgcttgataatacgaccaatcttttcaagttctgccataagattgtctttattttgcaaacgacccgcagtatcaatcataaggacgtcaactccctcagcaagagccttttccataccgtcaaagaccactgaagctgggtcagccttctcagcaccagtcactactggcacatcaacacgacgtccccactcaaccaactgagcgacagctcccgcacggaaggtatcagcagctaccaacataacttttttgcctgcttctttgtatttatgcgccaacttaccgatagacgttgtcttaccaaccccgttgacaccaacgaaaagcatgactgtcaaaccatcttggaaattaatctgctccctgtagacatcatccttctcgtagatatccacaagtttttcgataatcaagcgttgcaaatcctcagtctttttgacattttcaaggcgggcttcatagcgcaaatcttccgttaattgcgttgcaacattaaccccaacatcggaaagaatcagcatttcttccaattcttcgaagaactcctcatcaacacgacggaaattcgcaaagaattcattcaagcgagcagcaaaaccagtacgcgtcttcttgagggtacggttatatttttcttgttctgtttcagtttttgaagcctgaacttcttcaggtttttcctcaactttacgggtttgaacggcttcaaaagtgacagtttcacctttttctgcagcagcagctacttgagccttcttagcatagtaatcagccatgacatccgcaaagtggttatccacagcaacttgactttcttctgactctgaaacgccttctgcttcgcttgaggcctgattatcaacagaaaggtcttcgtcagacactgcttcactttcttctgtcacagtagaatcactagattcaacagattctgtgtatgaaatctcttctacttgagtctctgactcactgagctgttctgtttgactctcgcttatcccttcacttgttgacaagtcttgattattaagagcctcagtttctgaaatttcctgatttgctacagtttcctgtgactgtttttcctcttgtccaaataatcgatcaaatagacccatttggttctccttatttctctagaatatatttgtggatggcctcagccactccagattcctcattagtttttgtcgttactgccttggcaacagccttgaccttaggaacagcattcgccatagccacaccaagaccagcccactccagcattgtcaagtcgttttcctcgtctcccatagccatgacctgacttttatccagagcaaggtaatcagtcaagagtctcaaacctacagccttatgaacacctttaggcatgacctctaggataatttcacgagacttaaagacctcaaacgcttggtataaatggtcaggtattttttgaatttgagaatccaaaaacgcttcctcacagaccgtaactactttattatagacgatattttcaggaatgtcatcaatactctccacatcaacgaaggtcaaggtaggattagcctgacgatagagagaatgattgcctttacttggcacaccatagacaatgccatcactgataacatccatcgggagccccagaggctcaaagacagcataaatctgctttaaatcttctcgactcatctctttctttatgaggatatccccattattacgctgaaccaagccaccattgaaggtcacactatagtgcttatcatccaacaagcccaaatcttccaagatatgagtaatagctggcagaggacgaccagtcgtaatgaccacatgaccccccttagcttctgccgccttaagagcagctctattttcaactgttacttgcttatccttagtaaagagggtcccatctaggtccaaggccaacaatttaatctcagacatccgaacataccaatccttccatgaagtcaaagactgcaccatctttatggtgaccaatcacttcgtcagctactgccttaatctcatcgcgggcattttccgtagcaaccgcatgcccagcaaaggtcaacatctccatatcattgagattatcgccaaaggctacaacatctgaagcttgacgccccaactcttgacaaagatggtaaagaccaaagcccttgtccacacctttaaggataatatccatagaatcaaagccagttgtcacagctgtcatatcctcaaaaatcgtgttgagatagtcaccacgttccataatggtatccccttggaacttagcagttaccttgaaaatgtcatctgtaaccgcttcaaggtccgttgccataacattttcatagtaacgttccatggccttaagataggctggttctgcatcgtttggagcataggcaccacgacgtcccgacaagagaattccctcgcaagttggtaaggctaaagtcgtgtctgcaatttctaaataatctttaggttctagcttggactcaaataggacttcacccttgtactgaaccaaggccccattctccgcaataatagcaatgcggtccacaaaaccatcaaaaagctcctccaaggccaagagagctcggccagaagctactgtaaaaacgtaatctttagcttcacacgcatccaaaaggttttccaaacgtgccttatcataggcaccaagatggtctagaaaggtaccatccatatctgttgctaaaattttcaaaataatctcccttcaggtcgaatatacttgcccctattgtaccaaaaataggaatataagtttgggaaaagccagagaaattagagaaaatatggcattttacttgcaaatccactattttagttgtatcattacggtagtacaaaaataatactgttatacttttagaaaggagtctcttatggcttggacatttgatgaaaaatcgccaatttatctccaaatcgcctatcgcgtcaaactgaagatagcttccaaggaattgagtatgggacaacaactcctacccgttagagaatttgctcaggaagctggggtcaatcctaacactgtacaaagagccttccaagaacttgaaaaagaggggttggtctactctgcccgtacctctggtcgctttgttaccgaagatgaaaaactaattgatcaaaaacgacacgagattgcccaaagtctcatgaaaaactttgtcactgagatgacagccattggttttagctcacctgaaatcaaatctatcatcactgactacatcgaacaaacaggaaaggacttatagaccaatgactgatattgtaactctaacaaatctcaccaagacctataatggtattccagcccttagagatgtgaccatgtccatcccttctggtaaaatcattggtctcttaggaccaaacggtagtggtaaaacaactctcatcaagattttgaatggcctcctccaaccaacttctggtttagcaactattaatggatttcagccatcacctatcaccaaagctcaagtggcatatctacctgatacaacttatttggatgaaagtaagactatccaatactacttggacttcttccaagatttctatgctgacttccgttatcctcttgccttgcaactcttgcaggatttaaagctccagcctgatttgcgccttaaagacctatcaaaaggtaacaaagaaaaagttcagttgattttggttatgagtcgtgaagctaaactctatctcctcgatgaacctatcggtggagtcgatcccgcgtcacgtgactacattcttaaaaccatcatcaaccaatactctgaagatgcttctgttatcatttcaacccatttgattgcagatattgaatccgtcctagatgaagttatcttcttaaaatacggtcagattgaacttcaaggggatgctgataatatccgtcaagcccatggcaaatctatcgacaaactctttagagagatgttccataactaggaggtatgagcatgttttggaaattagttaagtatgaattacaatcggtccgtaagtggtaccttagcatttatggtattgccatcctactctctatccccttgggcttaatgctgcacaaattaatattcacctttgaacacagtcacgaagaacctagtctactcttcttcgctttcttcacactgatggtttttgctaccattatcgtatggggaaccatttatatagcgacaatagtcctcattgttagacgctttgcacagactgtctttgggagagaaggctatctaaccaatacactcccagtttctgcccaccaattgattttatctaaactcttggtagcctttattttaaatacgatttctagtctcgtagtactcgcttcgattgctattatagccggatttaatatagacttcaaagatttcctactaactactagttacttgggacagctcctaaaagaaataggtgccctctaccttgtcatcccttctacaattttaggaacaattagcggtatcctattctattacctctgtattagtattggaaacctctttaatactaacaaagttcttatggggtttgtcgcctattttgccattcaggctatcctatcctttattggtttcttctttggaatcggtgcagccttgaccggagatgcaacaaatactgcaattaataactcggcatatatatttagtctagttcagtctctcattctcatcggagcaagttactttggtacctactatatcatgacaaaacgcttaaatttagactaaagaaaaaacgtgttccttctggaacacgtttttttttgcattgaaaagacttatttactttgttctttacgataagtctcgatttcggccttgttaccccaaacgaagtgtcctggacgtacttcaaccatttctggtttatcaaccgaatagtcgtgttggtttggattataaaccttcaagactttcttacgttccaagattgggtctggaataggaacagcagacaagagtgacttggtgtaagggtggataggattgttgtagagttcttctgtctcagcaacttccacgattgtccccttgtaaataacagcgatacggtcagaaatgaaacggaccactgacaagtcgtgagcgataaagaggtaggtcagtcccaactctttttggaatttcttaagcaagttcaaaacttgggcacgaactgacacgtcaagggctgagatgggttcgtcagcgataaccaaatcaggttgcatgaccaaggaacgtgcaatcccaatacgttgacgttgtcccccagaaaattcgtgagggtaacgtgtcaagtgctcctcaagaagtcccacttctttgatgattttcttgattttagctttacgatcttcctcatccttatagagatggaagttatgcaagccctcagacaagatataatcgactgttgcacgttcattcaaactagccgcagggtcttggaaaatcatctggatacgacggataaggtcgtttttctcagagtgagacaagtgtccattgattttcttaccgtcaaaaataatctcaccattacttgtatcatttagaccaataatggcacgcccgatagtggttttaccactaccagactcaccaacgagggaaaaggtttcacccttgttgatgaaaaaattagcattgtggacagcaacgaatttcttgcttccttcaccgaaggaaatctccacatcttttacttcaactaacttctcaggcattgccttcctcctcatctcctaaatgtgcaaatcccatattagcacggattttttcatgtagattttggataacctcaggtttttcaacttttggtgcatcctcatgtaagagccaggtcttagcccagtgagtatctgaaacttggaattgcggtgctttttcctcgaagtcaatctgcatggcataatctgaacgcaaggcaaaggcatctccaacaactggtgtataaagtgatggtggtgtccctggaattgagaagagctcacccttatcatcagccaactgtggcaagcttgaaagcaagctccacgtgtatggatgacaaggctcatagaaaatctcctcaacagttgcatactcgatgatttcaccagcatacataacagcaaccttgtcagcgatacttgctacgacaccaaggtcatgggtgatgaaaatcactgagaaaccatactcctctttgagtgatttcaaaaggtcaatgatttgagcttgaatggtcacatcgagggcagttgttggttcgtcacagataaggacatcaggacgacaagccaaggcgatggcaatgacgatacgttgacgcatccctccagagtattggaaaggatattcgttgaaacgtttctcagcatcaggaataccaaccttgtccatgtaatcaatggccatttttttagcttctttagctgattttccttggtgtttgacaatgacttcaacaatttgactaccgatagtcttaattgggtcaagactggtcatcggatcttggaagatagttgcaatcttagatccacgaattgctgcccaatcttggtgactcttaagcttggtcaaatcttggccacgataatcaatagaaccactagcgacacgaccattttcttcaagcatccctgtgaaggtcttggtcaaaactgatttacctgaaccagactcaccaaccaaggctaaaacttcaccttcaaccaaatcaagggaaacccctcgaatagctgtcaaaacacggtcacgaacgtcaaattccacgacgatatcgcgagccgataatattacatttttattttctgtcatattggactcctatctatgcgtacgtgggtcactggcatccgccaagttttgaccgacaataaagagagagagggaaacgaggatcaaggtagtcaatggaatccagaagaggtaagcattgactgtaacgttctgtgcatagtctgaaatcaaacgaccaagactaggcgtcgtaacgggaagccccaaaccaaagtaagaaaggaaggcttcgtaagagataaatcctggcaagagctgactagccatagtcacgataactgatacaagttgtggcatgatatttttaaccacaatcttaggagttggtgttcccaaagtacgagaagccaagttgtactccaaatcacggtaacgcatgatttgaatacggatagtataagcaataccaatccaacctgtgacagtcatggcaaaaatcatgttccagaaacctgcacccaatgagtaagtcaagacgataacgacaaggagggcaggaatgtttgagatgatgttgtagatttccatcataatcatatcaaaggtcttagaaatcccccaaacagcaccaacgactaaaccaataacaacgttaatgaaggtagcgataacagcaataaggatagaattacgagctccaaaccaaacactgtcaaagagagacttaccattactgtccgtaccgaaccagtattgagcatttggatgcacataacgtacactaaagtcattaaccttagacacgtcattgaagtcaaattttgaaaacattgggtagataaagctcatcaaaatgatagcaatcaagattcccaacatgacagttgttgactttttcttgaagaactgacgcatcactgatttccagtatgaataggccggcgcatcaattgtttcagaggcaaaatcatcgcgctttacaaattggaacttacttttatcaattgaagccattatttacctcctttagatgtcaatttgatacgtgggtcaattatagtcataaggatatcacccacaagcaatgagaagatggtaagggctgtgaaaataaatacaagacccacaaccatagcgttatttgaagcacgaactgagtcaatcaacattttacccataccagggtaggcgaagattgtttctgtcaaggttgcccctgtgataacactaacgatagatgctgggatccctgaaaccaaggaaaccatagcatttttgaaaatgtgtttattcgaaatttcttgttctgacaaccctttggcgcgtgcaaaacggacgaagtcttgtgattgcaagtcaatcatgtaacgacgaatccaaatggcaagacctggtgttgacaagagaccgagaattacagatggcaagacgtatgaacgccagtcacccgcacccaagatagggaaggaatctggaagaccaatcttagaaccaatcaaacgaatgatataaaccaaggcgatggttggtagtgagagcaagaaagtcaagataccagttgacacactatcaaagagtgtgtttttaaagcgtgccatgtatgatcccaatggaattgccaaagcataagacaagaccaaaccaatcaaaccagcaatggcagaacttgtcaccattgatgggtactggtagcgactcttagtagctgtgtaagggtcatcaccatagtaagaacgatccctagcatcagcctgacttggtgatttataagtacgagagtagatatctactgaagatactttcttaccagtagggaagttgacctcagagctttgtgtttgcccttgtccttgtgtaataacatcaagaacaccctgctcagcataggttgggtaagatgtaccaaggttcatcttcacaaagttttggtgaacaaatgggaactgactgttaaagtaaagcaagtatttatgcttagttcctgaaccgacaactgaccaaccgatagctgggtcattttcaatacggatgtaacgcttcaagtttggatttgttttatctttaacccatccagtattgtcaaattcaaagaggtgtgcatagaaaccaaacacacgttcaagcactggcacatcacgtgtcgcatagaattgtttgctttgcttgaactgatgcaaacgccagccacgtcctaaactatccacatatttttggtagatagccttattttcttttgttggcttagtggttaccgacttgtcaactgagctagctttctcctgcaactctttggtgtcgtagtactcgatataacccatacgttcatagattgtattttcatagttagccttagaatcggctgtcttagcaatcttgttgtagttagggtcctgtctgaaaatcagacgcctcggcaccatggtatagataatcgtgtaggtcaaggccgtcacgacaaatattgacaatagagaacggagggttctcaataaaatgtattttttcatgtctcttcctttaattccaaaagaactttcccaatctaatgagaaagttccatcgtccttttatttaacgtgtttctcaaggtctttttgagctttttcgttggacttagacttttctttaagccagctttcacgggctttatcatagtttttcttagtgacaacatctttttgaggttcgaggtacttgaagtatctgtcagaacctttaggtcctacttgagagtaggctcctgagaatggtgtcaaacgagctaccattggagctgcacccttgttaaccataagtggcatgaagagtgagctatcttccaaccaagcttgtgcctctgcataacgttcataacgtacgttgaggtcgcttgtttctttagctgcattgtcaaccaaagcatcaaagtctttaagacctacttgagctgctgctgcattgttaggatcgtcaaatcccatgtaagtttttgtgttctcactagctgttgttttgaagatatcgaggtatgttgatggatcttcatagtcaggagcccaagctactgagatattgatatcccagtcttctgctgctgcattagctgcatacaatgtgctatttagaagatcatcttgagacatttgatgaacatccaccacgacattttctttaccaagtgtattttcaacagattgtttcaaagattgtgcacgtgcaaccgttggtttagctgcttggtcaactggaaggtccaagtgaattgggaattgaacaccatctgcttgaagagcttccttagctttgttaaattcagccttcgctttattagcattgaagataccgtcttgactgtctttaaagttaacacctgaccactcgtcaccatatgaagccatcttttcagttaccaaatcaccgaatgacttatcaccagcataaacaaaatcaggtttcacgagaaggttacgaacagcaagggctgcacctttttcaccattaagttgtgcagaataagctgtacggtcaatagcaaagttaactgattgacggaagtccttgttaagaagagctttcttagttgaatctttctcagcatcagtcttcttagatgtatggttgtaagactgacggtcaatattaacaccaaccccaccaatatctgcagatggttgtgtatagaagatattatctttatattgtttttctactgaattaaagtttgagcttgttggatatagacgtgcttggctataagcgccatcagtgaaattacgaacaagcgattcttggtctgaagcatcgtagaaagaaagtttaatgccatcgaagtggacatttttcttatcccagtagttttcatttttagccaattcaatagatgatttagctgtcaatgacttaaggatgtatggaccattataaaggatagatgatggatctgttgatttaccaaagctatccccttttgacttaaggaactcttcatttacaggccagaagagagaataagtcatcttagaattccagtaaggttctggttgtttaagtgtgtactgaagagtgtaatcatcaagagctttaacgccaactttagagaagtctttatcagtaccattgaaataatcagcaagacctactacagaatcttttgccaagtaaattgactctgtctttttatcagcagcatgcttaagacctgttacgaagtctttagctgttacttccgcatactcttcaccgtctgaagtataccatttaactcccttacgaagtttgtaagtataagtcaaaccatcagccgaaacagtccaatccttggcaatagcaggtaccaagttaccatatttatcattttccaaaaggccatcgacaccatttgtcacagcatcagtcgttgaacctttattggaaataaggtagtccaatgtttcaggatcagcagtataaacatagttataagtattgcttgaagtgtttgattttgatgaacaagccactaaaaccccaacacttaggagggaaacacccgcaagggccaaccatttactttttttcataagcattctccaaaaaatctttttttatatgcctacattataccataaaaaataagatgagtacaattttcagaatattttgtcttatactgactttctcacatttacaaacctagaaaacactagagctaagccctttcttggcaaaagaaaaaggctaactgccttttcctcaagaatattatttaacgtgtttctcaagatctttttgagctttttcgttagatgctttcttttctttaagccatttttcacgactttgttcatattctttcttagtaactactttttcttgtggtttcacgtatttgaagtagtctgatgagttcttatcacccacttgcatgctagcacccgtaaatggtgtcaagcgtgagataactggtgctgcaccgttaccaacagtcaatggaatgacaagcgagctatcttccaaccatgcttgagcttgggcatagcggtcgtaacgagcgttgaggtctgttgtttctgaagctgctgaatcaagcaaggcatcataatctttaagacctacttgagctgcggccgcattgtttggatcatcataacccatgaaagtcttggtattttcacttgaagttgtcttaaagatatcaaggtaagttgatggatcttgatagtctggaccccaaaccacaccgtttgaaatatcccagtcttctgctgccgcatttgccgcattaagggttgcattttgcatatcatctgatgacaattggttaacatcgataaccacattatcgctacccaatgattgttcaatggtttgtttcaaagattgggcctgagcaacatggattttagaactttggtcaactggaaggtccaagtgaattgggaattgaacaccttctccttggagagcttccttagctttggcaaactcagtcttagctttttcagcattgtagaggccatcttgaccatcagtaaagttgacacctgaccattcatcaccataagaggacattttctctgttacaagatctccaaaggtcttatcacctgcactgacaaaatcagaaggaacaaaaaggttacgaagagctagagctgcaccatctttaccattcatttgtgattgataagccgtacgatcaattgcgaagttgattgattgacggaagtctttgtttagaagagccttcttagttgatgtcttttcagcatccgtcttcttggctgagaatttatagctttggcggtcgatattaacaccaatggctgatgtagacgcacctggtgcagtgtaataaatgttatctttatatttcttctctacagaagaatagttagaactcgttgggtagacacgagccaaactataggcaccatccgtgaaaccacgttctagagcctcttgatccgaaccgtcataatatgacaatttgatggcatcaaagtgtacattcttcttgtcccaataattttcattcttagtcaactcaatagatgatttagctgtcaaagatttgagaaggaaaggaccattatagaggatagatgttgggtctgttgacttaccaaaatcttttcctttgttcttaagaaagtcttcgttaactgggaagagcaagccataagttgttttagagttccagtatggctcaggttttttaagggtgtattgcaatgtataatcgtcgattgctttaacgcctacatttgagaaatctttattggcaccagagaggtagtcagacaagccagcaatagaatcttgcaccaagtaaagagctccagacttgccatcagccgcatgcttaagaccagtcacaaagtccttagcagtcacatcagcatactcttcaccatcagaagtataccatttaattcccttacggattttataagtataagtcagaccatcttgagagacagaccaatcttcagctactgaagggacaagatttccatatttatctgcttccataagaccatctacaccgtttgtcacagctgtcttagtaggtcctgtatttgaagtgatgtaatccaatgattctggatctgaattataaacataaccataagtcgttccactagtacttgacttagaagaacaagccgctaaggcacctacactgaggagtgccacacccgcaagggctaaccatttgctttttttcataagatttctccaaaaaataaaattttactctttcattatagcataaataatcaagaaaagcagtcactttcagaatattttgcacaagcaaagtacataatgaaacatggcaaactcaacagtccattgtatttcctggatttctagctactttaatcgatttatttttaatcaccagtcatgcataaaacaaaaaggcctaacaccttggtcagacctcttttttgagacaaaattagttattaagagcttgagcagctgtgataatagctaaattataaatgtcttcagcactagcaccacgagaaagatcgtttactggtttattaagaccttgtaagattggtccgatagcttcgaacattcccaaacgttgggcaatcttatatccaatgttacctgcttgcaagccagggaaaacaaagacattagcatgtcctgctacgtcactatctggagccttaatagccgctgttgctggaacaaatgctgcatcgaactgcaactccccatcaatagccaagtcaggacgcatttctttagcaatatttgttgcttgaacaaccctgtcaacttttggcgatttagcagaaccttttgttgagaagctaagcatggccactttagggtcaataccaaaaactttagctgtttcggcagtattaattgcaatttctgccaattcttgagcatttggttcaatattgatagcacagtcagcaaacatcaagcgatgatcggtattttcacggttcataaggaagacacctgatgtacgagaaataccaggttttgttttgataatttgaagggccggacgtaccgtatccgctgttgagtgaatagcacctgaaaccattccatcagccagaccaagtttaactaacataacaccaaaataattgacatcacgaagcaacttttccgcatcttcgattgttgcttttcctttacggatttcaagaaatttttccttcatttcctcgaaatcttcataggtttcaggattaataattgtatagttaaagtctgcaaaaccaagatcgttcaagattttgtgaacttctgctgggtctcccaaaataataggatcaaccaatccttcaaatttcaaacgggctgctgcacgaaccacacggtcgtcgttaccctcagggaaaacaatcttaatacccttccctaaaatatgttcacgaagttcaccaaatagactacgcataaaaaaattcctcaatcaatcttttttagtttgtaagttcatgataacggtttcaaaatcatctgtcaaggaagatgcatggaccatctcttttttggtaaaaggatcaacaaatgcaagacggtgacaatgcaaggcctggcgctcaataccatagtctagagaaccaccataaagatcatctcccaaaaggggaaggcctaagtgggcaaagtggacgcgaatctggtgagtacgcccagtatgcaaattgatatcaaccagtttaaccctaccataatcatctaccaaacgataactagtgtgggcatatttccccgacttatggactcgacgtgtgataatggaatccacatcacgcgcaatcggtgcaatgatttcaccctgcttctcaagtttggtgtcaccttcaaccaaggcatagtaatgtttcttgatagacttctgttgtaactgtttatccatacgagcatgggcgtaaccatgcttagcaaacagcatgagaccagaggtgtccttatccaaacgtgtcacaatatgcacacgctggttgggataattattgctgacaaaatgatgtttgacaaaattagccatggtattatcgtggttaacacttggaatactagcatagccatagggtttattaatcaccaagaagttatcatcctcatagacgatatccaagtcaaaaggaattggcttcaaggtttcatgcggtgcctcgtcagggatttcaatggcaaccacatctccttcatggacaggataagtcgcaaactgctcctcgccattgacccaaatatgaccaccctcaaacttaatcttggccagaagtccttttgaaatatcatgctccttcaaaaaggtcttgacccgacaggaacgtcctacggtaaattcatatctcattcttccatgtctccaataaaggaatcacgtacgcgttcccagaaacttgtgtggctagcactagcaacaaaagaaatctttcgttggtcgattgagaattctacctttttcacattacggttggtataggttttattatcaacggatagagtgtagcttcccattcgggtaggataaaccgtaatcttctcatgcttgggcacaataagagggctacctaaggtacggtacacacgattattaagactggcaatctcagtcagttgcaaggcttcaatggtaggatgaaggaccgcaccacccaaagatttattgtaggccgttgatcctgtaggcgttgacactgacagcccatcaccacggaagctctcaaacaagacatcattaaggcaaacatctgccgccatggttttctcattacgcttgatggctgcttcattaagggcaatcgatgtaaaagaacgcccgtcagccagggtcaatttgacattcaaaagagggtaagaaatcttagcaccgctgtcttttcgaagcgtctcgattaattgatccacttcactgtctaaataatctgtataaaagcctaaatgacccgtgtgaatccctacaaaacgcacacgagcaagctctttttcatacatatgaaaggccgatagcaacatgccatcaccaccaattgagatgaccacatctggatttttcttggtcaaataaaaatctggatcatctcgaaaggcattaaaaagttttgaggccacacgcctactttggggtttgccattggcaataatagctaccttcatctcatccgaagaggtcttcatctgtgtcatcactatttcctacactatccttcaaagttctgttaattggatcaaagagcaactgggcatctctaatatcatcacgtatcttacgcatttcttcatcaagttcataagccatgcgggccgtagtttccaagcgaagcttaatttcctctggaaagtttccctgatacttgtaattaagggaatgttcaatggtggcccaaaagttcatggccaaagtcctaatctgaatctccgcaagaatctccttacgaccatcaatggtatcaacgggataagagataataacatgataagagcgataacccgaatgtttacggtttctgatgtagtcacgctctgaaacaatggtcatatcactacggcgacgaagcaaagccaaaacttcatccacatcatcgacaaactggaccatgactcggagaccagcaatatcctgcatatcttgagccaaattttcaaccgaaaggccacgaagggcgattttctcctcaatggaagccactgacttcacacggcccgtcacaaattcaataggcgagtgacgattttgcttacgaaattgtttacgaatgcctcggagcttgattttgagctcacctacggcctgaatataggggtctaaaaattgttcccaatccatggtcaagataggactcctccttgtcaaaagctttagttttttataaaataaatacaatctgttatattataccatatttgaaagcacaagggaggacacacatgaaccatttagagatagagtacaagactctactcaccaaagacgagtacaatcgtttagcgatgcttttctcccatgtgacacctgttacgcaaactaactactacattgacactcctcagagtgacatgagaaataaaaagttgtctttgcgtattaggacacttcccactcatggtgagctgaccttgaaaatccctgaaaaagtcgggaacatggagtacaaccttaccatggactgtgcggatgctaaggctttgactaagtcgctggactttcctgattgtcaaatcaaatccattcttctggaacgtggggttaaactagaggacctaaccatcctcggacatttaaccactacccgtcgcgagtatcagaccaacatcggcctcatggccctcgatgtcaatgtctatgccgataagaaagactacgagcttgaactagaagtttcggatgccgagaaaggtaaagacgactttgatgctttccttaaagaaaataacattgactttaaatatgccaagagtaaggttgcacgctttgtagctaccctcaaacgagacaaagactaaaagttagacaaggagttggctccttgtctttttatgtttaaacacatgcagcgttaaataccacaagcattttacctcataaatgacctccagaggtctaaaaacgcatacaaaggaattttatctagcaaaggttcggtatttttcactaatatcatactttgatggctgaaatttctgcttctttttgctaaaatagaactatctgtagttttattacaatagccctaactgggcttagcatcttatttttttaaaggagtcaccatcgtcatggtacatcaaaaagcaaacccacaattgaaattgttctcgctcagctcaaacccagaaattgctgaaaaaattgctgaggctactggattgccacttggtaaagtatcttcacgtcaattttctgacggtgaaatcatgatcaacatcgaagagtctgttcgtggggacgatatctatatcatccaatctacaagcaaccctgttaacgaccacctttgggaattgctcatcatgattgatgcctgcaaacgtgccagtgctaactctgtcaacgtggttatgccttactttggttatgcacgtcaagaccgtatcgctgcttcacgtgaaccaatcactgctaaattgattgccaatatgctggttaaagctggtgtcaatcgtgtcttgacacttgaccttcacgctgtccaagttcaaggtttcttcgacatcccagtagataacctcttcacaatgccattgtttgctgaatactacaacgaaaaaggattcacaggaagtgatgttgtcgttgttagccctaaaaactcaggtgttaaacgtgctcgtagcttggcggaataccttgatgcaccaatcgctatcattgactacgctcaagatgattcagaacgtgaagaaggctacatcatcggtgaggttgaaggtaaaacagcaatcttggttgatgacatccttaatactggtaaaacgtttgctgaagctgctaaaatccttgaacgtggtggcgttaaagacatctatgcagttgctagtcacggtctctttgcgggtggtgctgccgaagtcctcaacgctgctccaattaaagaaatcttggtgacagattcagttgcgactaaagaaaaagtgcctacaaacgttaaatacatttcagcaagtgagctaatcgctaacgctactactcgtatcttcgaacgtcaaccacttagcccactctttgcttacactgcaaacgaggactaagctatggtttatttggacaatgcagcaacaactcctttaaatactgctgctatttcagctatgacacatgttatgactgaaacctttggaaatccatccagcctccatgcttatggtcgtcaagcttccaaggaacttcgtgaagcccgtgaagaaatggccaaacaatttaaagtccctgctcgtaagctcattttcacttctggtgggactgaaggaaacaatacagctatcaaaggttacgccctagccaatcaagctaaaggcaaacacctgattacaactgcaattgaacaccattctgtccttcacaccatggcctacttggaagagcgttttggttttgaagtaacctatattcaaccagaaaatcaagtcattactgctcaacaaatcgctgaggccttacgtgacgatactattctagtttctgttatgtatgccaataatgagaccggccaattgcttcctatcaaggaaattggtgacttgcttgccaatcaccaagctgccttccacgttgatgccgttcaggtagcaggaaaacttccaattcacccagaggaacttggagctgattttctctctattagtgcccataaattccatggacctaaaggtgtcggcctactctatcataacgatttgcattttgacaacctactccatggtggtgaacaagaggaaaaacgtcgtgccagcactgaaaatctggtcgggattgcaggtatgaccgctgcttacaagcatgctagcgaccactaccaagacaattaccagcatgttgaaaagattcgtcagagctttctagatatccttaccgttccttatgaaattaatggtggaggatctagcctacctcacgtcatcaacatcagttttcctggtaaggaaaatggccctctcttaaccttgttagacctagctggctttgccgtctcaacaggttctgcttgtactgctggaactgttgaccctagccacgtcatccaagccctctatggcaaggattctgacaagttaaaaacagctattcgcattagtttatcagaggaaaataccgctgaagaactccaagctctagcagaaaaacttaatcaaatcataggagactaacatggcatttgaaaaaagcattcatttgactgactgtaaataccgttacaccatcagtcctaatgtcaaaaaattcaccctacgtgatacgacttttgtgcaaaataaaatcggaaactacgagttgcaccgccttctcgaaaaagtgcctaactcaggcgaaggtttcccactcaaaatcactattaacaaagacttgactggtttcaaattgtcgattacagacaaatctggccttcgtaacgttaatatctttaaaaatgaagatcatcacatcttgcaagagaaattctatttcttgatgcagagtttggttgatcgtaacgttttcgagcaagaagaagtctaaacttctttcttactacatagaaatagcctatccttgtgataggttttttatatcgcctcatctacactattttgttgcaatcttcacaaacttttcttaaaatataagagaatcatactaattgaagaaaggaaagcgatcaatgacatttgagaaaaacatcccaaacgccactgccaaacgtctctctctctactatcgtattttcaagcgattccatcgtgaaaatatcgacaaagcaagctctaaacaaattgctgaagcgattgggattgaccctgccactgttcgtcgtgacttctcctactttggtgagctaggtcgtcgtggctttggttatgacgtgaacaaactaatgacatttttcgctgaactccttaatgacaatgcgactaccaaggtactcctcgtaggtgttgggaatgtcgggcgtgctctcctccactaccgttttcaagagcgtaatcgcatgcagctggtcatggcttttgatacagacgataacgaactggttggaactcagactgaagacaagattcctatctatggaatctctcagattaaggacaagattgctcaagaagatatcaaaacagccatcctgacagtgccatcagttaaggcccaggaggtggctgatcttttggttgatgctggaattgaaggcattctctgcttctctccggtcaacctcaatcttccacgccatgtggtggtccaatacgtagacttgactagcgaactacaaaccctactctatttcatgaaagaagaagaaaaatcaaggagaaacaatgactaaaccaattatcggaatcactgccaatgtaaggcctaatccagcccatgaagacatcaactggtcctatgccccatctggctttgtagaaggagttcaaagagccggtggcctagcaatcctactaccagtatccgatccttcggaagccaagacctacatctccatgattgacaaactcatcctgatcggtggacaaaacgttgaccctaaattctacaacgaagagaaccatgccagtgaagatgacttcttcctcgaacgggatatctttgaaatggcactcatcgaggaagctactaagcaaaagaaacccatcttttcaatctgtcgtggaacccaactcatgaacgtcgcactaggtggtagcctccatcaagatattgagaatcactggcaggacaagccttctgattacctctaccatgagatgattgttgatgagaacagcaagttggcagaaatctacggacgcgaaacgtctatcaactccttccaccatcaaagtatcaaacacttggcctctgaccttcgtgtcattgcgcgtgatcctgaggacaacacagtcgaagctgttgagtcaaatagtccagaccttcgctttcttggtgtacagtggcacccagagcttctcctagacaaacgtgaagaagacctcaaactctttgaatacgtcgttaacgaactttaaaagcaactgagactgcactcagttgctttttcttgtctttatcccatcggctcaatctaaagctcaaaatcctccctctcctcacgaaaggaataataggttgattttccaacaatcagatgatcaagcagacaaatccctaagtcatcacaggaccgcttaatcttttgagtaaaatcaatatcattacgactaggataggcttcccccgaaggatgattgtgaaccacaatcaaagacgttgccatcagatgacaggcataatgtaaaatctcacgtggctcagcaatcgaacgacggaccccaccaataaagaccgtcttttgctgaataatacggttctgcgtatccaaatagatagccaccagatgctcctgaggcttgtcgccaatatccaacatcatacgacgcgccacctgctggctagacataatctgctcagaccgagccaactcagccttctcaatccgcttagccaactccaccatagccttgagctcaatagacttcacacgcccaataccaggaatctcctgaagctcattcaaggacaaacgagacaaatccgccaaactcgtcatccctttcaaaatacgattggccatagataggaccgactcagacctagtccctgtccgcagcactatcgccaacaactcctggtccgacaaaacctctgctcccttctgtaagagtcgctcacgaggcaaaagccccgactcctcagctacaatactatacataagaaaaaaacctcctacttacctattcgtaagtgggaggggaagttaaacagctgaagatttttttaaacctaatttctttaacaaggcttttcgatatgctgaaaattttttctttaacgtcagtggttctgctacctgtgacatttcaataagatggagcttataacgttctgcaaaagatatttttcctgaagcaataatacgataatcaattcctagatcccaggcttttcgatagaaaagataagaaagggtatcctcatcaaagtcatagaaagcttgcttatccttaagaataattttttctagaaaatcttttgacaaccacatagaaccttgaaaaacatgaagcgaatgattgattactttttgacattcgttagttagtttaactgtctgttcttgatttaaggcaccaattgcatctgtccaatagagttcttttgataaatcagcaaaaaccagaccaacctctggaaaatggtcaaagattgatgccactttctcctcatctaatagtatatccactaaagcaagtcttgtagcttcatcaacaagtttgccctcatttccaaagtcttctgtgtgaaaatgcccaataaagtcgtactcgctaagctgagatgccaaggatactaaggcatggtaatgattatcaaatctttgagagactagctgaaaactatctttatcaaagctatttaataaggtgttctcaacgatatttttatccaaatggcttgataaagtgaaataataaaaggcagataactttttatcagagaaaacttttagtctctcaaggtcactaatatgtacatggatagccgaatgatagtctttcccacttaccgaatgaaatgaaggttcaatgattttctcatctaaaatgactaagctatctggcgaatggtagctgttaagatgggacttaattagtgctactggatatgccgatagcttagtaatatagtctaaaagtagtcttccctttttttcattgtcagtaaatgcttttagtttaatgaacggtaccttatgttcaagtgtacttatcggtctatagtaagaaaaatcagggtgaattaagtcttctgcctctgcatcaatagtattaaagacagcatcataatggtaaccagcttcaagaagaacactagtaaccctagtttcataattatcaataacatcttgaacatcggtaaaagtctttatagaagtccaaaattgttgaaaggattctgaaccgacaacatgctttttgaaagatataaaataactttgcaaatgctcatcgaaatatttggtctttctaaaattcgtcatcccccaaaaatcaacattctgtcgttgttcaaatccttcaactatgttagataaatcccaaagaggaccaaagcaagtatcattcatgagtgtaaccgaatcgaagtctgttaaatgttcgaatccaatatgagccataccatctctccaggctgcaaaatcaaagcccaaattctctctctggataacttcatctatgccaagctctttgagagttaatgttgccgattccgttagttgactatttgaaatcacaataagtttagaaaaaagtggtcgaagttgctccaattggtagagcacatgaccacttaattcgtcgtacttattataatgaacatacaataagagacgtttcatttattcttgaatctcccattttccatttctctgaaccataccagttgcagaatctttagcagacttatcatcatcttcaatatcagttcgatttaaaagaataactggtgaattttccgaatcagcaaaggcaatcatctgatcatccttatctcgaacagaaacctgaagcttgagcttgatattattaagatgggaaagactacatttgtaagtaagtgtttttcttccagaaccactcgtcttattgtctatagaattatcattgtagatccagataccacggtcaatatctgtcaatgaaaaggcaatataggtctcaatatcctcattgacatcatatgaaatctcaaatgaaatatcttggtcaggactgataatattgtcattcaagagttttacttgtaaatctgtgattttaggattttcaacaacaacgtcgtcgtttgaaaccttttgaccagcagcattatcaaaactatattggttagcaacttcgtctggatcaccaaccacttttaccaaaccatgttcaatcagaactgctttattacagtattttttaactgctgacatgtcatgggtaactaagatggttgtttttccagattgcttacgttccatgaaataatcattacacttacgttggaaggcctcgtcacctacggctaaaacttcatccaaaataaggatatccccctgagccttgatagcaactgagaaagccagacgaacctgcataccacttgagtaattcttcaacttttgattcataaaatcatgaagttcagcaaagtctacaatgtcatcatacatggcatctacttcttctgttgaaaaaccaagcatggcaccattcatatagacattctcacgaccagttaattccggattaaacccaaccccaagctcaatgaaagataccaacttaccatcaatggtaaccttacctttttctggaacataaatctcagaaataatttttagaagtgttgatttaccagaaccattacgtccaacaattccatagaaatcacccttttcaacttcaaatgaaatatcttttaagacatgttgttcagtataccctttaatccctttaaagcgattgactaaagttgttctcaaactctgactcgcctcagttggtaacttaaaatacttacttacatgatctacttttacagcaatattatttgacattatagaatctccgcaaatcgtttagcatttcgattaaagacaaggaaaccaatgataaaaatcactacaggaatcgcataaggaacaaaagcaatcaatttattattaataatatcccatcctcttggattaactgggtcaatgataaaatgacgcatatcctgtaaaatctgagcaatcggattaagcatcataatctttgcaacaaactcttgatttctttgaagaagataagtgattgagtagataattggacttgcatacatacctgcttgaagcacaacttcccagataggaccaatatcacggtatttaacaaagagtgctgatagaataaaagcaactcccattgccatcaatagcacctcaatgaagagaggaatgataaccaaagtattgaaaccaattggaacatggttaattaaggcaaatacgaaaacaaccactaggttaatcaagaaattaatcgctgctcctagtacggatgagatcacgattgtttgcttcggaaagttaagtttacgtaagagatcccctcgtgaaacaatggaaagcatccccatattggtagcctctgtaaagaagccccaaaaaatcatagccaaaagcaagcctactgcatagtgtggtgtcccatcatcaaatctcaagaaacgaacaaagacaaggtacataattgtaaacatcatcaaaggtttcaaaatagaccaaagataaccaatgaaagaaccttgataacgcaatttaaaatccgttttaatcagttccttaagtaaaatcctatttttttgactaaagaaattcatttagtcctccttatacatgaattttgtcaaaatcaagctcgtaaacacaaaagtatgaaaagccctgtttttacggtaaccatatgttttcaaacgacggtaacgctctcttaacccttgatccataatggtcacaaagttttcaaccaactctctattttcagtattcaatggcaaagaaagaagattttccgcctgattctgactagccttaatcaacttccaatatttgttgaacaaagtctgaggtcgaatccaattctgcatacgtttccgaagagttctagcacccaaaacattatctgcgtgctgacggtaaagctctgttggctgatcaatatagaccagatgaccaaatgctgaagcaagcaaacctaaataccagtcatgcatcagaagctcattaggttcctcgccagtccataattcggctagagcatgattaattagcgacacaccgccagtaacggtgttttctgtcatttcttgaaccaacttagtattagcatggtcagattgagtacgaatcatactctcatgaagcacctctaaatcttggttcacaacctttaaatccgtgtataccaaaagtggtttatcagatgggtatctactcgcttcctcaagctgaagagatagcttctcaggtaaccaagtatcatcctggtccgagaaaagatagtagtcagattcttgatacttcaaaagcgtaaagaaactctttattacacctaaattttcagtttgatcaggattgataaaagtaatgcgatcatcttctaaagcgaaacgtttgataatctctctcgttttatctttagatccatcatcacgaattaacaaggtccaatcagtataagtttgctgctgaatactttcaatttgctccgctagaaagttctcaccattataagtggacatgagaatagttactttcatgataaaaacagctcctcgtattcacccacgattttttcccaggtgtaattttctttcatatttgctttagcagcatctcccaagtcctcaaacgacacttgaccatctacagaatcaataagcttagacaaattcccatcctctttattccaatacaaggcggtctcctgagcaacctgatgattaaagtctacattatagataagattgaggtccgtttgagccaaggcctctaataagcctggattcgttccacctacttcatgtccatgaatataagcaaaggcttggttacggatatacttaagcaagtcctgatcatagacagtccccacaaacttcacacgtttatctttatcaaatcctgttatctgtcgtagttcatcaaagtaagcattcccttcatgattacagatgataacaagatcacgctctgtagaggacttcataaattcacgaatcgcagtttcgtagttgttttcaggaacaaatcgacccagtatcaaataataatctttttcttgagtctgccatttctgataccaatctcgaacgggggcatcctcagcagtcaaagtcgtcttagataagtcagttccataagcaatgaaagtcgttctagcccacggataggtattttgaatataggtctcaatacctcggttatcagaaataattaagttcgcatactttgtcatctctttttcagagtatttgagatagctttgaacaggtttagaccacttagcacgtttccattccaaaccgtcaggattgaccagcaaaatcccaccaacggactgaattttcttggcaaaataaacaatgaaggcaccaatggtatttcctaaaatatagaaaattggggattgaattccctcttttttaataagtttcaagctataattgatagccatcatatcgtaagctatgacacgcgcaggacctagctttggaggattgaccgtaaaacaatccgcacctttatagtcaaaatggttgccagtactttcgtcagataagcaagccacgtgataacgtatagcaggtgataccttatgagaaaccaacttctcaacaaatgtctcaaaaccaccatattgagcaggcaaacctctactacctatgataaaaatatccctcaaagtttacctccattcgtcacatctctcaaatacacagaattatacatagtagcttttattataccattttggaaggtattttgcatgattggacagaaagagtaaagcaaaaaggcccttcgaaaatggccttttcattcttaatcatagataacgaggttttaccttaattcatctttttaagctgaaataattttttcacagcagattttacactctctgctagagcttttcggctgttgagaaaatctacatctttctgatttactttcttataacgcaattcatcatcctcaagtttttcagtaatattagcataaacactctccaaagagtatctctctttcaaactaggaacagcttgtactgcttcaagtttctcctgattaaatctattaaggacctctgaaatggttctttttaaagtatctaaatcacctagaggatagatatgcccctgctcattcatatattcaaaagcagatttatgtcccgcattatctgataaaattgttggaataccatttaaaacagactcaacataaaccagaccaaatgtttccatgctagatggaaaaacggctaaatccttatcagtaatctctgaccaagggtcatctaaataccctaaaaatgagaccttttctaaatgatgatctgcaatataatcatcacaaacttgtttgtaatcctcatcccatgcacctaaaaatacaagttcggtgcctgctagattaagcatttgaaaagctttaatcaactcaagctgattctttctatgagtcaagcgaccaactgaaacgatacgatggtagtcgttggattcaagtgtcagcccttctttagtttcaatttgagtatagggtgcaaaggaataaatcttcctatttggaaaatgcttttgcaaatcctctgtcaacgctcctgttacagcaaaaatctcatcagaaaacttgtctataaagtcaagtttttctttatagtaaccaaattctccctcaggaaattcatgaatcaaccaaaaatgtttgatcttctcataagtggcagcaagtgcaccttgaaaaacattgactgtattactaataacaaggtctaccttgttatctacaataatatttcgaatatctttgacattcttattgtaagacttcactcgcaaaaaatgatttgctggcaatccacccggtgcttcttcccaccaccatttaacggctgaaagaccataggttacaatccctgctttctgaagttctgcttgatactcctcttgagatggcaccttgtaatcagggaaaacgtttaacacacgataacctttttccacaagaaatttcataagattgactatcgaaatttcggcaccattatccagggtccctgtcggagaaataaataaaattgttttagtcataaattatgcaaataccccccagtaatggaaaagaatcaaatacatagcaactaggaagtttgcaatcaaagtaaaagttactatcttcaatcttttctctcgagctaaatcaactttagctgtattagcaattaacggtaacaagagaatgatgaatggcgtaaaataacgaccttgagcaccaacagatatattagctccctgaccaagaacaactggtgtccactgcatatacattactgtaacagcagctagaacctctagtaggaagagaatccaggatgcattagcaaagtctttagtgaagaaatccttcttactagataggaataaaatagtaagaactacgatatcaataaagattaaccaaagtggcatttgtaaagtaaggttaccaagataaccgaacattccaagtgacaagataccattcaaattgtcattcaactcaggattaaagagcgtattacgcaaaacttcgccataatgacgaagaccgccctgattcttcattaagaactgaagaaccactacaaggccgactacaaagagaaggtagaaaactgctttatattttgaaataaaggtcttaactgattgcactggacgatttagaaagtctaaggcaccttcaaactcaagtggtacaaacggaatcaatcccaacaataaaacgttatttggcttagttgctaacagtaaaatcgcaagacctatcacctggataatattacgattggtaaaacgtttagaataggcaagattcgtgataaaaccgagagccaacatcacttccaaatagttcatcacatcataagaaagtgacgaagcttgctgaaccataataggtagcagcgaaataaacattaaggctgttttcccatacttgaaataacgtattaaaaagtaaattcctagtatataggccagtgcattaaagatgcgccccatatagataatcatcccgactgtaggactaatccaacttccaatcgtcatccctatcaactgtggaataaaggagattgtttttaaactcacaccaaattgaaaaggttctttactcatatcaatcttttgagcaaaaatctgcttatattccgctaacttaaccttatcattacttggaatctcatccatccacttaaaagatgtatcggttggtttatggaaggtctcccaagtcatacgcgcgtggtttgtttcatctggcacacgattaattggaaatacaaacataaatgagaaaataaaaatcgtcgctaagatgaaaaataaattttcaacttttatttgtttaattctgttcaaaataagtcaccatatcatctttcttgcttaaggtacaattttcaaggactgctcggtaagctgattctgctaacttttgtcttaaatctggagataaaactaaagcttctagcttgtcaaaccactgatcatcagtagctaacagacctgtttcaccatcaataaccacatctgaaaaagctcctatcttgctcgctactgttggaacttttaccaaagcagcttcaatccacttaatctcagatttggcacgattaaagatagaatccacaagtggtgctaggttaatatcaacctcactaatcaaggcaggcaatttgtcccagtccacataatcgtgagttacaatttgattttcaaagggcttcatatcttgtgggatatccaaaatcccgacaatatgtaattggacattgctatattttgtaagcagttgcttaatagctggtttaatcaattcgaaattctcattatgactgattgaaccagagaaataaccaatcttaacaatgtcagatgtttgagagtaatctttgatatattgactactaatagcgattaaatcgtcagaagctaagttgcgattaagtaaaaccttactttggtacttatacaactcctcctgcaactgattagtcgaagtaatggcaccatcacagttttctagcatatagccataatttcgaacacctgcatcatagtttcctttttcaaccgaattcaacccttgcgtataacttaattggtctgtataaaccgtatcaaagactaaatcatcaatatcaaagaagacaggtttcccatattccttagctaaatgacagagacgtaaaagttcaggtgagattggggaacggtagataatgatgcgactagcattttgagccatcgataattggaaatcagataggttaacaactttgactgcaaagccatgcttgcgtaattgttctgccttgttcaagacacggtaacgggtacattgcggaataatattttcaaccccatcaatcaatagaatatattgatcacgtggaacagccttaaatttattcacaatatcttccagaattgacactgggtaatccgtttcttctgcgacaaactctaacaattcagggacttctgaatcacgatccagaccttgccacaagaactggtcttcatcataatttttcagagccgtatattttaccaaaggactacctgctttaagcatcttaagcgggtggatatacatggcagaatcttcatattcttgcacaaccgcatcatatcgataacccaaatcggcaaaatgcttggtaaaacgtgtctcatgtcgaccaatagccttatcacgagaatctgtatccgtcaaatgtgtccagtactcataaaagtcatcatcgtttagcatgagcttttcaataactaggaaataagactgaagatgcttaggaatgtagccataaggattctctttagtaacatcctcttgctcttctccaaaggaaatcccccagaaatctagttgcttatcagccatttcctggaacacttgagacaaatccctcatcggaccaatattagtatcattcaccaagaggagctggtcataatctttaagcttatctttaccaaaggcaaagattccttctctaaaggccgcagtatcatatcccttgttatcacgagtcagaacactaccgtaggtctcaagggtattaatatcatcatcgtgaagctgtccattgacaactacaataacatcatctaccaatggagccaaggcttgcaagaagcgtaatttgtattcttgaagacgagcttcagattcaaaaataacataaaccagtgctttcttaccattatatgataaagcagaacgttgactatttctgagacgtcgtaactgacgaaccttaagtggtgtcattcgacgacgtagctgtatcactttgacttttaaagctcttaaataatttttaatcgcttttggattcttagcaattactcctgctgtctttataggtgtaattagtgcgttccccaaacgatatgacagtgaacctcggatcagctccatctctttatgggcatccttcaatctcttagattgtgtatactttcttcgttcaagttgatcacgttcttttttcaagcgattaacatagtctgtcacttcatcgtgatgtttaagcaagctatccaacctctcttccaaaaccatgaggttatcacaaactgccctgtaaacttcatgaggaagcttatcaagatatttctcaagaatatcaagatagatttcataatggtagcgaacggagtcacgtccagaaattgaccctgtttcaaagacacgataattaagcttagtgcttggttgatataccgctttagcactgttattaataatcaagttcaataaaaagtcataatcttcaagctttttacgatttaacttctcatcataacgagtatttccaataatacttctacgaatcaaagaacaattatcaataaaactagcatttaggaaagcagttaagtcaaattcacggcttttaaggtagaactcttctttttctggattaaaaagatcacagtacgcaatatcagcatttgtttccgtcaacttactgtacaactgttccacataatccgcatcgaggtagttatcactatctacaaatagtaaatagtcacctcttataagctctaatcctagatttcgattctttactaccccaaggttttcatgagtttcaaatcttgtctcaaaaggtgaatccttcaaaacctcttggataatttgagttgaactatccgtcgaaccatcatccaaaacgattaattcgatattagtataggtctgattaaaaacacttcgtagacactgctcaatatacttttcatgattgtaacaagtcacaaccactgagattaaattattcatttttccatccattttgtttaacaaaatatcaattagtacctgataattactaatattactatgcttcaaagattgactaaagtagtaatctttgaaagtgcataccaccttaattatactatagtttatacaaaaaagaaaaagtcctcttgctattgagtaacaaaaaaaagcagaatacaattctgctttttactgattttctgtgttattcatttatacaatagttattttctgttttagttcttatataaattaacaaaaatataaaagttgaaaatagcgaaatagtaaatgaaagtttagctaacaaagtataagaataagtcacttttaaaatatgagttcctggtggaactgctacagcagttgaagaccattcacttaacgagctcaatactttttttccatctaaatatactttttggcctttataaaaataaactggaaggtaagctatttctgatttgttatgactattagtaaactggaaggtagcatcactagctgaataactactctgttcactattaaccaactgtttgtctaaatagacttcatgttggacaactctccaccttggatcatcgggcataatatttgtcttagttcctttacttatttcatttgtatagtccggaacaaacacagaatgtgttaatttataataatcattcctctttgataattctctaaaagcaactttaaccggctcttcagcaagaagcttacatgtcttcatcacactaacagtattcatagatatggctagaataatgaacgaaacataaatatatttctttaatttaaatagaacaacagctaataaataagataaaaatattgttgtaaagccatttaaacgccacggaaattgtattactttaagcaaatctaaaggaaatttctcccaattaactaaacaagtagtggctaaaagtaagcataaactcattacaaaaagtatacgccatattttttctatatatcgtaatctgagacagataactactacagaaataaaaagaacaaacccaacttgcttatctagttgattgactaagttaaccataattaactgtttgaaattaaacaattgattatttaatggaaaagtaactggggaagataactttgtaaatagtatttgttcaatcagtggaacgatttgaaataatgacatcaaagtacaagataatactgcattaataagagccattattctcttttttctttcatcagcacaaaccaaaaatatcaaaagataaatcgtaagcaataaggtaactataaaaacagataataaatgagagtagactagcaatgtcataccaatagataacattggccattttctataatcacctttaaaaacttggtacgcgccagcaaataccaagggtaaaaacgccatggctaaaatttcacccgtggcaaacctaattaaaatattataacttcgatatgtactaaatgtatatataattgcaaataaataaccaacaatttttgattttgaaatactggttgctgagtaaaaagaaatagatagtgttataaatgttatgataaacagataaaagtaccacgcaacccatatactatgaacaaaactaaaaattatataaaaagggtaatagattaaaaatggataaaagaaattaattccctgcccactattgtagaatgttttaaaattaattggactatcaaaaatatttgataaacctaacattctatctaagtgaaaatgtaaatcatcaccatataaacttccttttgaaaacaaaaaaggaaaaataaaaatgagtgaaaatactatcatgatcaaataaggtttgactctattaaagatattatttttcatctatttttatttctccatcaattattcgtcttctgactcttcacatattgtttcataaggatatttgctatccattttggccaaaagagttggtacatatacaaatcttctttactacgagtattatcagcaatagtcttagatgtctcagattcctcatgaattcggtggcacattagcttatctgacacataaacaaaacgtcccttgtattcactaatcttataccaagcataccaatcaaggctgaccttcattccctcatcaaaatagaaattcttcaatttttcaagattataggtgacagctggacaacaaattggattaccaaaagccatcacacgattgcgccagaaatggctactaggaaaaagattcatggtttttagcatcaaagttttaatctttagattggtatttgcaggaatctttagaccatttttttcttcaaaataatcagaatatccgattagaacatcactagttttttccatcttggccaatactttttctacatatcttggctcataatagtcatcctgatgggcgatagtagcatattttgtttctacaaaagagatagcattattccaatccttgccaatccccccaccttgtttagtataaaatgggatagcataacgctgacaaagttccttaatcgaatccagtggcgttgaactatagcagataatttgagattgaagagtttgatttttcaaagattgaatacaggcttcaagataatcactttctccataagcacaaattacccaagtatgattatccttcattcttttcctctttctcttctacatgactttttagaatagataattcttgaactaaatgtttaatctgctctttttgtttcgataaagtcatggtttgtaggaaagcgatgaccaacaagaaaaagatagcaagcgacaacaaaaaattcgaagtcagttcaaatccaagtaatcctgcaaaataaactggaataacatcaaaaatcgaaataacaatcattaccagactgatgacaatccacatgaaggcctgttcaaataagatattattcttattgatatttctaatgactaaataaaggaaaaagattgaagctaccaacatcacaatagataaaactgacattattcactctccctcataaaggctgcgataacaatcgacgaacacacttcaagcatatatcgaatggatttaattggcgtaatagaagaaacaccaccagtacgttcaaacatatttgctggtcgttcaacaactcgatatttacgtttcaaaatatgaacaatagtttctggttctggatacttgattggataacgcttagcgaactgtttaataacagctttatcagccaaacggtaacccgaagttgtatctaaaactctttgtccagttgtccatttaataagattggaaataacactaattccgaagcgtctcataaaagttgtttgaaattcagacttaacatcaccaacaaagcgtgaaccaataactaggtctgcttcattttttcgaattggttctagcaaatctgacaaggattcaatatcatgctggccatcgccatcaaattgaactgctacatcatagtcatgctctagtgcatatttgtagcctgtttgaaccgcaccaccaatcccaagattcatcacgagattaacagcattaaaatgattctcttccagaatttgttttgtcttatctgttgacccatcattgataacaacatagtccaaatcaaaatcaactttcttgcggtaattcaagatacttgttaccgtgtcgaaaatactttcctcctcattgtaggcaggaattatcattaaaactctcaactacttctcccttcctttacagtaaaacctcgaaaacagtgaaactaatctcaaatgttctaaagttctaaaaaccattacagaaataactgtttgaattcgttccccatttatctcagatgataatggtgttaaatttgaatcaatattttctttagaaacccattctttaattcttctatattgatccataaatgacgaacttgaagcggctcttccagaaaagagtaagtaccaaatgtaatatcgttttataaaatagcgaatatattttgaatcgccagcaactttaagcaagtgactcaagaaatacacaatatctatattcggattaaaacctctttgagatgtatttgagatactcttctcgttaaaaaaccaattatagccgttataatcaattattttaattttttctgttaaattgtaggcagtcaatgtaaagacaacatcttcacctattggataatcaaagaactgaatattattatctattaaaaatgaagttctataaatacgtgcccaaggagcaacgactatatacttagaccattcagactgtgttaaatcttgcttaaaaagtgtcttcatttcctgattaacacgcttataacccccaagaacaatatctagttgttcttgatctattgcattataaaaacgctctaaataatctgaatcaacaaaatcatcattatcgataaatacaatgtacttcccattagcaagttgtatacctttatttctggttttagcaactccctcattttctttatcaattactcggataaaatcattaacagccgcatactttttaataacttctaaactattatctgtagaaccatcatttaaaagaataatctcaaaatctgtaaatgattgatttagaagagaatccagacattgtttaattccctcttgcgcgttatatacaggaattatgactgaaacggttggattagacatattatactttctatctattattttttataaaatttcagaaggtaagaaaataaccttgttgagatattaattccaaaaatcgaagtaaagatacctgtcattttaaatgatttgttatttatatgactggaatttttcaacaaatatttatattgaattaataagttgcgtatttcttggttaaatagatatggcttagcataaggtagaatcgaaatataagaaattgtaaaataggtatttaaggctttacgtttaacttcagataatgacttttcatcagataaacctctactaattccctcaagagtatctaaaacatttctttctttcactacatttgttaaacttccagctctgttctgacgatacatatactgagtgctagtaattacagaaaaactttccatccttttcattattgatgaacaatacaaactatcttcagagactaaatcctcaggaaaactcaaccccttattaattaatttcttagaaatacatttattccaattagggccattaaataagccataattagtagcttcacctaagtcttttaatcgagatatcggggactctttaatttcgttatcgtagtaataactataaccgaaaataataacatctacaagttttatagtaagctcactaacaatctgttttaaaaaatgactatcactccaaaaatcatcaccatctaaaaacaaaatataatcacccgtagctctcttcattccagtattacgtgccttcgaagcaccaccgttagattggtgaactacattaatttgcttagattgtttcaataattcatctgctactttacctgtctcatcagttgaaccatcatctacaattataatttcataattatcatatgtttgtttaagaatactctctacacagttttctagataatctgccacattataggctggaataatgatagaaaatttcatgtcaattattttttccttctaaagattgtatatgggtttgttacaaaataaattactagtgaagcaagtagccatgctatcattgcacaaagaaatgatagtgaggctccaaaaatttcaaattttgacactagaggcttggcagttaagattgacacaatataacccacaataaaggaaataaccaaaaaatgttgcttcctaaatattgtcaaaatattatcacatacagttgaaaaagtacttgcaattcctccaagcaacaagacgataaaactcgtctgatactgtttaaggttagtcccgtatacaatatccaaagctgggatggctataaaagcaccaattagaaatattaatgtgcaagttccaaataaaatcttgaagagattattcttgtaagtgacaaaatgagaaatcttcttttcttctaaaaagactgcaagttgtgtaatcattggtctaagaaacacaatcataagattcatggcaaaaattggtgtaaacaaaatactaaaatctcgctgaacaccatttccaatcaaaccttgattaaaaatatcattcaaagcatatttaggctgattataaattgagaccaacaaaaaagcattaataaataaaggtaaacaatctttcaatacattgataatattactcaacctaacactcttaagatttaagcgatggaagacttttgaattaggataatcgaatagagcaataaaaataaatgaactgatggtttgtgcgatcactgaccacaatagatttttagagataactaaagttaaagcaaacacaattgttgaaatggtatttctcaggaaaagagacttccctgcaatatccagacgttctttctgctgaaacaatccttgaaaaacatctgatagggcttcactaactcggaaaaaagatacccaaaaaattatccctatatttgagtgagtattagtattaaaaattaaatacgtcactaaaagaagaaccattgcaacattagaaatgattcttgtgacgaaataggtgtcaaaagaatacttttctcttatatccgtcgcttgaaaatctctgacttgaaaacttgctacaataacaaagagattcgcaattgcataagcaaaactatagatatccgctgaagcactatttaaagcccgtgtaacaataaaaagaagtataactgaaacagcagctgaagacatactccctaaaatattccagaaaaaaaccttttgggcagttacttttttcaaatatttcactctctttcgataactatatttcattaattatatcatattctaaatgaaaaaagagagaacagcatgacacacgttctctctttgaactttaaaagctcattaagtattcttatttcacttcttgtttgtaaaactctttcaaagcatcttgccatgttggaatgacaaatcctgtagccttagccttagccaaactcattgttgagttaagtgggcgtttagctttagctgggaattggcttgaatcaacaggtttcacttcaacatcagtatctttgagaatttcgaccgcaaagtcataccaagttgtatcctctgctgcatcatttgacaaatgataataaccatattccttacggttttcagccaaataagtcatgaactctgccaaagtacgtgtccaagttggacgaccatgttggtcattaacaactgtgagtgttttatgagtcttagcaaggttttgcatagtgaagacaaagttcttaccatagttaccgaatacccatgcagtacggataatgtagtagttagtcacatgtttttcaactagttcttcacccatacgttttgtgcgaccgtactctgtctgtggatctggtttgtcatcaacttcccactcttgaccgactggtttttcaccatcgaaaacgtagtctgttgaaatataaactagcgttgcaccatgtttttcagcagccttagcgacattttcagtacctgtcacgttgatagcatagtcaagctctttaccttcatcttcagcagcatcaacagctgtgtaagcagcacagtgataaaccaaggttggttttacttccgcaaaaacttcatctactttggcagcatcagtgatgtccatttctgccacatctactgctacatactcttcgttacgttcgtcaagaaggtgacggagctcagttccgagttggccatttgcacctgttactagaatcatatttttctccttgtaatttccaataatgtcagtttcattttaacaaaaaaagcagaaaaaatctgctttcaaaaaatataatttatcatttcatcactacaaaaagttcattatctttggtataaacatcatacatttttgttgtttctaattgtttatactctgaatttactgttgttgcatcaaatggtttaaaatcaacgtttaattttgtgattgcattaaatctcatcgtcatatcccaagaaacattagtattaggcataattaaactactaatcattggatagaccgagatcgcattttcataaataggcgaattagcaacaaaacgattaatattgaccacattgtttttatcattcaaatacttattcaaactatttcctagcatagcactctgaacttcaaatgtattattctgttgctttaaattgcttacataaataaatgaaaaagcaaggaaataaaagacgagtaaacttgaaaatactgattttaaaacattaataatcttatttcgattggttattcccaaagaaacaactaacacaatcgaagaaaagactcctagtccgtactcatatctaggtctcaacaaataaaattgttctgaaagtattaaatagcttccataactcaaaatacttcctaaagcaagccaagcaaacgtaaaagctaaagctacaattttcttttgcttgctactactaattatattaaatactaacaagataagtattactagaaataaaagaatccagacttttgtgctttgaagataaatatttttcagataccctttagcatttgctagcataatactaggaagatgtaataaacttgggatacttccttggtcagcaaaaatcggtggcttaatagtaatttgtattttatataaaaccatacccccaacataggataaaatcgaacatactaaactctttatgttcaatttaccactgtagactacttctaaaaagagaagtgttagcgtcatgagaatataaattcccgacgatgcttggtatgagttacacataagataaatacatacaaccgaacatatactaaataattttctagactcccaaaagataaaaggaagaattgacactaaaatacttagtgacataaatgggttgtcaaacctaaagctcaaaggctctaaaaaccaaggatttattccaattacagttgaggctaaggctaaaactggagtaacctttttcgatggaaacaatacaaacaataatatcgtacttgcaaatgttagtataaaggctgagataatatttgttgtcaggccaggatccgttaaatgagtaccaccttgaattagacgtgctgaaaattcactcaaatatctggagtaatgttcagaaaagcccgtataacccagaacttgacgaccaatatcgtcaatataggggtactcagctaaactgatgttaatattaactaaaagataaacacctaagataagagataaaacaaatttattcctcttaatatagccttttaaattattaaatactcctaaaaactcttcaatcattctttagcccttctccttaacaatataaactggtcgtttcttggtttctaggaaaatctttgaaatatagttcccgatgattcccaaggccaggagttggattcctccgataaagaggatgattgagacaaggcttgcccagcctgcaacactcccacctatagttagttttcggataacgacaaagacaattccaaccaaggagattaagaatgagaaggttcctgcccatgtggcaagtttcaagggtacttctgagaagttgataaagccatcaagtgagtaactcaataggctccagaaagaccatgaagtctctcctgccacacgttcacgattttcataagagacgtaggccacatcaaagccgacccaagaaaagagaccttttgaaaagcgattgacttccttgagctcaagaatggcatcaacgacttgacgagtcatcaagcggaaatcacgcgccccatctaccatttcagtatcagaaactttattaatcaaccaatagaaggccttagcaaagagtgaacgaataggcggctcacccttgcggtctgcacgtcgtgtccccacaacgtcgtaaccttcttggattttggcatacatttcgatgagcagttcaggtggatcttgaagatcggcgtccataactgtgacgtagtcaccttgggccgcttcaagtcctgcaagtaagcctgcttccttcccgaaattacgagagaaagagagatagtgaacattctcaaattgttttgaaacctgtctcaaaacctctaaggtgcgatcttttgaaccgtcattgacaaaataatagttgaaagtcagctggttggccatttgtcgctcaactgcctgacaagcctctaaaaaaggatgaatagtctcttcctcgttataacaaggaacaacgatagccagtgttttcataagatttctcctaacgaatacctagggcgatacgggcataacgactcatcttttcgatagtccatgctggtgtccagaccaatttaacctctgtcttagtgacttctggcacttctttcatagcgtcataaatttggtctgtcaaaaggtctgccagtgggcatcccatagtcgtcaaggtcatatcgatttcagtatagccatcttgttggaaacggatatcgtaaataaggccaaggttgacaatatcaatccccaactcagggtcaataaccatttctaaagcttccaagatacgatccttgattttttcaatttctgcttcagtgtattttacttcagacatagcttttcctccaaaatcagggcctaatattcaggccccttccatttactatcttagtcttcaataaagtctttaagttgtttactacggcttgggtggcgtaatttacgaagggctttagcttcaatctgacgaatacgttcacgagtgacgttgaagactttaccaacatcttccaaagtacgcatcttgccatcatcaagaccgaaacggagacgaagaacattctcttcacggtctgtaagggtatcaagcacttcatccaattgttcacgaagaaccacacgagttgtgtaatctactggattttcgataacttcatcctcgataaagtcacccaaatggctatcatcttcttcaccgataggtgtttcaagagaaactggctcttgagcaatcttaaggatttcacgaaccttatctggagtcatatccatacgttcagcgatttgctcaggtgttgggtcttgtcccaactcttgcaagagattacgttgctcacgcaccaatttattaatagtttcaaccatgtgaactgggatacggatggtacgtgcttggtctgcgatggcacgagtgattgcttgacggatccaccatgtcgcataagttgagaatttgaaacctttagagtagtcaaatttatcaacggctttcataagccccatgttaccttcttgaatcaagtccaagaactgcataccacgtcccacataacgtttagcgattgagactaccaaacgaaggttggcttctgccaaacgttgtttagcttccaagtcaccattttcaacagcaatagccaattctttttcctcttcgttactcaagagagggactaccccaatctctttgaggtacatacgaacagggtcattgaccttagctgagtttgaaccaagaagctcctcgtctgtcaattcttctggttttggggcttcaacaacatatttagatgaaggatttccgtccttatcagtgatagagataccaccgtctgtcaaacgttccaaaaggtcatcaatcccatcagcatcaagaacaaatgggataactagtttttctgtgacttcatcatcaattgctgtaccagcttttttgtggttacgaatgaaatcagcgacttgaacgttaaatgctgtattttgttttttctttgccatgtgttactccatatctcgtttttgggcgatgagcatttgcagggcttccaccgctgcatccacatcaccgtggttacttgattctcttatttgtttactttgcctacgaaagtcctgttccctcaaaaaatgatttctacgctcttcgatagcctgaacttcttcaagactagtttcaggtggtaaaatctcctctaaaacctgataataggctgtttgcacctcttgagaaagtagagacaaagctacggtatcaatctgaccatcctgtttcagaatatgataaagctcctctaactcaggtgtttggaagaaaaactcctctctcatgcgatagtcatttaaaatcataggatgattaagcatacgatggaagagttgattttccgctcgacgaagacctgtaatcttcggtgtggaaggtagtttgaccgtccctctaaatcctgacgctgaagactcataagcactattactagcagccgataattgagccgtctgctgattcctcatggtcaaccgttcattattaaccgcttgctcgacttggaaaaaatcaaagtcaggcaaaaggtcggccaccttagaaatgtaggaattttgtgccgtcacagaaggtgacttggcaataatcttagcaatctgctcaacataggcaatttctgcttgaagattgtctacattagcaggttttagctgtcctatccaaaattccacatctgaaatgcgggactcgaccaaaagtttccccaaagcctcttcggatgttttctgtagatattcatcagggtccatattgtctggaattttaacaatatcgacttgaaaatccgataaaagctcaagagacttggcgattgcattttgcccagccttatcaccatcataggtcagaacaattttcttggttaacttacgaaggcgattgacatgctcaggggtcaaagccgtccccatagaagccacagcattaacatgcccagccctataggccgcaatgacatccatgaacccttccatcagatagacctcatgagttttctgtatcactggcttagcctgatccaggtggtagagttcataggacttattgaaaatacgagtagcccttgtatttttgtacttggcttgccctttttcaacatcttccttagtccaaacacgccctgaaaaaccgatggtctttccaaactcatttttaagcggaaacatgattcgatttttaaaagtatcgaaaagacgattactttcagaaagattaaaaagacctgattctgtcagtacctcttcgtcatatttttttgatacagactgatagaggtaatctggttcgtcaggggctagaccaatctggaaggtcttaagtaaatcgtcagtcataccacgctcatagaggtaggcacgcgctgcttctcctatcttggtcgtcatcagaacagcgtgataaaacttaagcgcatcctcatgaagatcatagaagccttgattaggagaattctgctgctgagcctgtcttggtgcatctatcgtaactgcaatacctaagcggtctgccagaaccttgacgctttcttgaaaagaaatctgacggtattcctctaaaaatttaaagacatccccagactttccgcaaccaaaacaatggtaaaactgcctatcctcgataacgttgaatgagggggttttctccttatggaaaggacagagacccaggtaattacgaccggcacgattaaggctgaccacttcgccaatcacgtcgacgatgttggtactgctcttaatatcttcgattaaagctttatcaattaccatctaatcgccccctatcttaccataattgcattacttctaattataacacgatgaaaaatgaaagtaaaataaaatcaatttttcatgagcaaatctcttgtcaagatttacaaaatcggataaactattaaaagtaaataaaagaaaggattcattgtcaaaatgattaaagaacttaaagactttttgttcaaggggaacgtccttgaccttgctgtagccgttgttatgggggctgctttcaacgctatcatcacttcacttgtaagtgatatcatcactccacttatccttaacccagttgttaaggctgctaacgttgagaacctctctaaattgtcatggaacggtatcgcatacggtagcttcttgagcgcagttatcaacttcatcatcgttggtactactctcttcttcgttgttaaagctgctagcaaagcaactgctcttagcaaaaaagaagctgaggatgctgctgaagcagcaggtccatcacaagaagaactacttgctgaaatccgcgatcttcttgcaaacaaataatttttatttgttcaactaaagacatatgaaactcaagacgtctgaaatctcaggcgtcttatttttttgtatctcaggactactaactgacttatttattcgatgaaaagaaaaaaacttgagaagactcaagtttttttctgttaatttattcttaattagaattttttacgtttgcgagctgcctctgatttacgtttacgttttacagaaggtttttcgtaatgttcacgtttacgagcctcttgaagagtaccagctttagtcacagaacgtttgaaacgacgaagagcgtcgtcaagtgattcgtttttacgtactactgtttttgacattgaattcacctcctcaagataatgtaacattttacacgttctattcaagtatacaagactgatctttttctgtcaagaaatatcttttaagtttgagtatttttgatgtcaacgttattttctaagtcttattagagattatcaggggctttaccatacaaaaaactagaggaatcatcctccagtctctcttttattcaactgctgtatatttagaagcatccttgatgtactcgtcgtaagtaccattgtctttcaatttcttgataaccttgtttactgcttctttcaatttgtcgttacctttagccatagcgactgctttagcatcaccatcgtcaactttgagggcaacacttgccaaagccaaatctggattttgtgccacgtaaccttctgctactggtttttcaaggtctacagcatcaacttggccagatttaacttcgttaatggcttcacccattgctgtaagtgatacgactgttgagtctttcaattgtttcttagcaagaccttcttcaatggtacctttttgaacagcaacttttttacctttaaatgcatctaagcttgagtaagtagattcttggtctttacgaacgatgatagcattttgtgtttcgtagtaaggatctgagaaatcgaaagttttcttacgttcatctgttactgagataccagagatggcaatatcagccttaccagcttgaaggctagaaaggacattgtcaaagctcatagttgtcacttcgagtttaactccaagttcatcagcaatagcttgtgccaacttgatgtctgacccgacaacttggtctttaccgtctaccaatgttttgaactcaaatggtgcataatcagggctaacagctacgacaagttttttattttctttaatagattcgtaagcgtctttttttgacccacatgccaccaaagtaacagcagcaaggagagccatggctccaaggaatagttttttcataagaaactcctgtataaatataatttttgctcgtttattttacttaaaattagtggtattgtcaacatttattaagaaattgcgacagtttttctaagcccttttgaaggacgtccttatcacaacaataaccgatgcggacatgggactccttgtcaaaacggttacccggaaccacaagaacaccatagttctgaagaagctctaaggcaaaatcttcgataggacgatttacatctaatttgacgaaggaagttgatacactagcaggacgaatccagctagccttaggctctttggcaatccaggcatccataagggctagattttcctctacaatctgacggttgcgtttcaagatggctgctttattttccaagacaagggtagccaccatatcatcaaagactccagcacaaatcatcgtatagtcgcggtagtcacgtagaatgtccgccacttcagtgttagaagctacccaacccacacgaataccaggaatggaataggtctttgaaagactgttgacggcaatgcccttttcatacaaatccacaatagaaggtgcaggttggtcaaaactgcgatagacctcatctgagaagatataggcgtctgcttctttagcgatagtcacaagctcctcaaggtaagcagtatccataagggcaccagtaggattgttggcattgttaatgcagatcatcttggtatttgggcgaatcagacggcgaagttggtccaaatcaggcaaccagttattgtcctcctcaatctcccagaggtccacatctgctcctagtgacttaggaatgtcatagagctgctgataagttggatacatggagatgacatggtcttcaggctcaataagagcgtaaagggctagcatcgtcgctcctgtagccccattagtttggaggatattatcaaccggcatgtccttgtataagctagacacttgagttttaaactctggtgacccttcaatccagccgtaatccatctttttctttagtagttgagcaaaaaaggcttccttatcaaggcctgataagtcaaataattcttccattgtgagggccttaattgaaactcctgcgatatcatatatggcagacttttcatggacattcagccattcttcaacaccaaaacgtggtagcttcatagtttctccttgcttttcttaagcactctatacgatgtcatttgtctattttgacagacttacctactttgataataactgtttttagcagagaattcaataaaaaatggggtattcccccatttagatttaagaatttttgacgactccccttgagtgagcaaagccaacaccaaacgagactttccgtagttgatgaaagcacctgaaattgactcgtttcaggtgctcagaagttttaaatttacttactttgtttgtaggttgatgcttcttttaaccatttgtcaaattttccagagtctttagtctctttgatgacagcattgatttctttaagcaagtcatctgaccccttacgtgttgcgactgcataagcatctgaaccgtctgacttgaggttaaagttggcaagggttaaatcatcattttgagcgatataaccttctgcaatggccttctcaagtacaactgcttgaagctgccctgacttgagttcattaatcatttcgccatttgaaaccagtgatactacacttgccttagaaatttgtttcttagcaacggtttcttgaacagaccctttttgcgtaccgacagtttgttttgcgagactatcagtgcttgtatagtcatttaccttgtcttttttgacaatcactacattttctgacgtatagtagctgtctgaaaaatcataaaccttcttacgttcatctgtcaccgaaatccctgcaatggcgatatccgctttaccactttgcacgttggcaagaacattatcaaaagacatcacggaaaattcaacctttacgccgagtttttcaccgatagctttggccaactcgatgtctgctccaactagcgtatctttgccgttaaccaatgatttgaactcaaatggtgcaaattctgattctgttgccacgacaattttcttcttttccttaatcgttttaggacttactccctgacttccgctacaagcaactagaaagcaggtagcgactagagctgtaaggataaaccaaaatttcttcatataatgactccttatttgctagaactcttaagtgaaagagtgtaggcatcttgaacatagctgtcaatcttaccttcttttttgagtttagcgataaccttattaaccttttcttttagcttatcgcttcctttaggcattgctacagcataggcatcttttgaatcagacttgagagcaatgtctgacacagctaggtcgctattttggtctacataaccttgtgcaattgctttttcaagaactactccttcaacttgaccagacttcaattcattgatagcttcaccaggttgtgccaaggaaaccacattagcatctgacaagttggctttggcgatattttcttgaatagaacctttttgaacagctacagattttttagcaaaatcacctgtttgtttgtaagttcctgtcgcatcttttttgacgacaagaaccgtttcagactcatagtaggtatctgagaaatcaaaaattttctgacgttccttagtggcagagattccggaaatggcgatgtctgctttaccagattgaacatttgctaagacattatcaaaagacatttcagagaatttgacttttacgccaagctcatctgcaattgccttagcaatttcgacatctgccccaacaatcgtatccttaccatcttggattgttttaaactcaaaaggagcaaagtgcggattaagagcgacagtcaaagtccccttatctttaactttatctaaagtgttagtcgatgaagaacaagccgctaaagctgtcaaagcaaagacacctgcaagtcccaataaaagttttttccatggtttcataatcaatctcttttctatatttattaactatgtaagtataataatgcattattatgcatttgtcaacggaaaaatggactttcattgattataatttttatttttattaatattggcattgctataaatcttgtaattcgtttattttaaagccttctatctgattttaagacaaaaaaactattcattcatttgaataaatagttcattttattaccaaaattctcggacgaagtcatcttcaaggcgctcccgatagaaaagttctgagagattgtcttcttcaaagacacgtagcagattgagcatgtcataagccaagtccatcttaggcacatcctccctggcaacccagcgaacttcgccctcctctgttgaatggatttctccttcaaaatctgaggtcctatagaggaaaaccaagtaccgttcgttatctgtcgtgtaaaaatgcttcataccaactaatttagggtttttgatggtcaagccagtttcttctttaacctcacggataactgattctaccagaccttcatgtgcttcgatatggccaccgggtagggctgctcccgaccagtaataacgctttggatcgcggatttgcatgacaatatttccacggccatcttcgatgagacacatattagttaaaatagttgcttgtgaacgtgacatatatttcctttcttacttatattgcctaagtgatgtaactagccttaatccatactcttcagctcaagaaccatatcacggatttgagccgccaactcgaagtcaagcagttctgccgcttcgtgcatttgcttttgaagtttcttgatggcttcttggcgttctttcttgttcatggcactgtagtccacagtatcttctgccacttctgcttcattagccttggtaatagaaataaggtcacgaatttctttcttaatcgtttgtggaacaatgccatgctccttattataggccatctggatttcacgacgacgagctgtttcatccatggccttctgcatagactctgtaatcttatccgcatacatgataacgtgcccctcactatttcgggcagcacgtccgattgtttggataagtccacgttcattacgaaggaagccttccttatcagcatccaaaatagcaaccagactaacttcaggaacgtcaatcccctcacggagaaggttaataccgataagaacatcaaagacacccaaacgtaggtcacggataatctcagtacgctctagagtcttaatgtcagagtgcatgtatttgaccttgacacccatttccttgagatagtcagtcaagtcttcagccatcttcttagtcaaagtggttacaaagacacgctcgcctttttcagtacgagcattgatttcaccgaggaggtcatccatttgtcccatggttggacgaacttcgacttctggatcaagaagccctgtcggacggataatttgctcaacgacagtctcagtttgctccatctcatagtcacctggagtagcagacacatagacaatctgatgaacatgactctcaaattcttcacgtcgaaggggacggttatcaagagccgatggcaaacggaaaccgtaatcaaccaacatcttcttacgagcttggtccccgttatacattcccttaatctgacccattgtcatgtgactttcatcaatcatgatgaggaaatcttctgggaagaaatcaagcaaggtgaagggtggctcgccctcttttcgcccatccatgtgtcgtgagtagttttcaacaccatttgtgtagcccatctcacgaagcatttcaacatcgtattctgtcctttggcggatacgttgagcctcgatgagcttaccctcagcttcaaattgcttaacctgagcttccatctcttccataatattcttgatggcctcttccatatgctcttcattagtcataaagtgagtcgccgggaaaagaacaaggtgctcgacttcaccgagattgcgtcctgtcaaactctcaatctcacaaatgcggtcaatctcatcaccgaaaaattcgacacgaaaggcgtgctcatcacggctggcaggaaaaatttcgaccacatcgccacgcacacggaatttcccacgttggaaatcaatatcgtttcgctcaaactggatatcaactaggtcatttagcagcttgtctcgagaaatttcttggcctggacgaagactaactgctgaatcagcatattctttaggcgaacccaaaccgtaaatacaagaaacagaagccacaacgataacatcattacgctcaaggagggccgacgttgctgagtgtcgtagcttatcaatttcatcgtttacagagctatctttttcgatataggtatctgatgatggtacataggcctctggctgatagaaatcatagtaggaaacgaagtattctacagcattgtctgggaaaaactccttgaattctccgtaaagctgacctgctaaggttttattgtgggcgataaccaaggttggtttattcacgcgctggatgacctgactcatggtataggtcttacctgtccctgtcgctccctttaggatttgagccttttctccaccttctatattatcaaccaaggcttcaatggcctgaggttggtccccagaaggttcatatttagaaaccaaatgaaattggttgtcttcttttctatctatcatggtttttcctttcatttatgtaatcattcatctcttggtcggagaaaaattctccactactgatgggaatatgtatcattcgtgtctcagcaacgtatttgcgttttcttcgtgtctgataaccgagttttttatcatatttcaaggccgttttactatctttgaaaaaaatgtataaaactctatacctcttcctttcccaagaccttatattcccgaaatcatagatacgctttaggatatagtatatagttgatgagtgtttggcatcatccattggcgttgaccagtccttcataaccaagtcaatctcagacagcggaatctcaaaggtgacccgtccacataatcttccataataaataaaggtatcattgttaatttccaaaatttttttatgacctttaagtctcacaataccatcaactaagttagtcagagcatgaataaatattagtaaaacgaggaaggcaacacagttatccacaaaattcccaaaacgataatcatctataagaaaacaacagaataaaccggtggaagcgataagaagtataagtccatagacaatctgtacccaaatcatacctcgcttaagcttaactatcatctcttcctcttttacaaacttttcttctattttaacatagaagtaaaaagaccgagtctttagaactcagccttaaaagttttctttctttaattgtaatcgaagaatgatgatacctaccaccagaaccacacaggtaacgatatttccttctaggccaaaggcaccacctgacaaccaatcaggtacacctgacctggcctgaaagtgcaataagctgccacctgcattctgtccactaactgacacgccaactagatttccttgcgcaaagttccaagcaccgtgaagggcagcgaccccccagatattatctgtcttgagcatgtaaagggccatgagaacccctactagaacaatactgataagagacaaggcggtaacaccttgatttcctaggtgtaatattgaaaagaaagaacttgaaatagcaattccccaagaaaggtttaatttattagtcaccgtctgaagcaaccaaccacgtgtcaccagttcctcggttccaccttggataaaccagaaaggtattagggaaagtatgtataagagggttttctgcgaaaagtctaccttcacaaattctaaaccgcctagtaaataagtcccaaggaaactaactaacaagagtaaagtcccaaatccccaccccttaagcaagttcaaccaaatatgacccttgaaaaatccaagtgtacgaatgggacgtttttcaacaactttaacccagaaaaagatagctaaggcagtaaaggcaaatgttcccaactgaaaatacatgtttgaaaacatcttataggaaatcgtatttatatcctggaactgaatgttaccatttaatactaagaaagaaagaacaatagccattggaattcccacaacaatccctgatagaaatccacctacaaggacataaccaaaggcaataaaacaggacagcataatcatcagccaacttggaactttatcatatcggctagtatatttctcaagcatacgtttcttcattttttagctcctgtaacaaatcttacatgtattcgattacagtgtaactaattgacacaagcttgtcaacttcttctcagatagctctcatagctaacgaatcttgttacatttcctaacatcaaactccaagaagtttgataacaagacctttttttgatagaataggagggtattttataaaggagactttttataatgaagaaaaaacttctgacactcttcttgagtgccatgtcagttttctttgttttcggagttaaggtatctgctgaaacaatttcagtcgtttcagacacagcctatgccccatttgaattcaaagattctgatcagacctacaaaggtatcgacgttgatatcatcaacgaagttgccaaacgtaaaaattgggatgttaaccaaaccttccctggtttcgatgcagctgttaacgctgttcaatcaggccaagcagacgccctaatggccggtactactgttaccgacgcacgtaagaaggtcttcactttctcagacacttattacgacacttcaattgttatctacacacgtagtagcgacaaagtcagcgactacaaacaattgaagggtaaaacagtcggtgttaaaaacggtaccgctgctcaaacttggcttgataaaaacgctagcaaatatggtttcacagttaaaacttttgacactagtgatttgatgaacaatagcttggattctggttctgttgacgcagctatggacgacacaccagttgttaaatacgctattggtcaaggaaaagactacgctatcaacattaagcctgaatctatcggtagcttcgctttcgctgttaaaaaaggcggaaaacacgaaaatcttatcaaagacttcaacgaagctcttaaggaaatgaagaaagacggcacctacgacaaaatcatgaacaaatggttgggtgactcagaaaaatcttcttcatcaaaaccttcagcagatcttaaattgactggtgatgctaacgcaaaagccactcctgttaaggaaacctacactatctcaatggactcatcttttgctccatttgaataccaaaatggttcaggtaaatatgtaggtatcgatgtcgatatcatcaatgccattgctaaaaaccaaggtttcaatgtcaaattgacaaaccctggtttcgatgcatcacttaatgctgtacaatctagccaagctgatgccgtattggctggtatgaccatcactgatgctcgtaaacaaatctttgacttctctgatccttactacacatcaaacattcgtttggctgtagctaaaggaagtaaggttaaatcttacaaggatcttaaaggtaagactgtaggagctaaaaacggtacgtcatcttactcatggttggaagaccacgctggtgagtatggctttactgttcgtgcttacgatgaagcttctactatgtacgacagcttgaactctggttcaatcgatgctcttatggatgatgaagccgttcttctatacgctatccaacaagggcgtaactttacaacaccaattgaaggtattgccactggtgaagtcggatttgctgttaaaaaaggcactaaccctgagttgattgagatgttcaacaatggtttggctgctatcgttaaagatggtacttacgataagattatcaataaatacctcgatagcaacaaatcaaaagaaggaagctcaaaaaaagctaccgatgaaacaaccatcgtaggcttgattaaaaacaactacaaacaacttctccaaggtcttggaattacccttggattgacccttctttcatttgctattgccatgattatcggtgttatcttcggtatgatggcagttgcaccaaacaagacactccgcgtgatttcgcaagtctttgttgacgtggttcgtggtatcccattgatgattgttgcagccttcatctactggggtattcctaacttgattgaaaatatcactggtcaccaatcaccaatcaatgactttgtggcagcgacaattgccctctcacttaacggtggtgcttatattgccgaaattgtacgtggtggtatcgaagctgttcctattggtcagatggaagcgagccgaagcttgggtgtcccttacaatacaacaatgcgtaaggttatcttgccacaagcggttcgcttgatgttgccaaacttcatcaaccaatttgttatctcattgaaagatacgactatcgtatcagctatcggtttggttgagctcttccaaactggtaaaatcatcattgctcgtaactaccaatcattccgtatgtatgcgatcttggccatcctttacttggtcatcatcacatgcttgacaaaattggctaaacgactagaaaagagacttaaataatggctgaattgaaaatcgatgtgcaggacttgcacaaatcatacggcgacaatgaagtccttaaaggcattgacgccaaattctacgaaggtgacgttgtatgtatcatcggtccttcaggttcaggtaaatcaactttccttcgtacgcttaacctacttgaaacagtgacatctggtaaggtagtcgttgatggctatgaattatcagatcctaagacaaatcttgacaaagcccgtgaaaatatcgggatggtcttccaacatttcaacctcttcccacacatgacagtccttgaaaacgtgacatttgcacctgttgaactcggacgtatgaataaggaagaagctgataaattagctatggatcttcttgatcgtgtgggacttgctgacaaggcagatgcaatgccagatagcctatcaggtggacaaaaacaacgtgtggcgattgcacgtggtttggcaatgaatcctgatatcatgctctttgacgaacctacttctgcccttgaccctgaaatggtcggagacgttcttaacgttatgaaagaattggcagagcaaggtatgaccatgattatcgttactcacgaaatgggatttgctcgtcaagttgccaaccgagtaatctttactgcggacggtgagttcctcgaagatggtactccagatcaaatctttgataacccacaacacccacgtttgaaagaattcttggacaaggttctaaacgcctaactaattatcaaaacagttactcttgctagagtagctgtttttgattgccattttggataagaaaaacagagcaagtgctagacttgctctgtttcttcatttaattcagggtgttttgctgcttcttcccttgccaaacgctcacgttcaagacgaagttttcggttaggatttaagcgcgtaaagagttcttcaagtttctttggattccaaacatcggccgcagaaacaaaatttccatctttatccctgaaggatatcggtttatctcccattgtaaacctcttatttcaatatttttatatttcactgaccttacacagttagtgaggttgatagccaaatcgccatagcgactgccgtagactatcaagtgcttcagcacttagagagtctttcaacgtcaatccacaaactcaaattcgaagttaccgatacgaacgatatcgccatccttagcaccacgttcacgaagcgcttcatcaactcccataccacgcaattgacgtgcaaatttcatgatagattcgtcacgttccatattagtcatgacaaagagtttttcaagtttctcaccagaaagtacccatgaggcatcgtcgtcacggctaatttcaaatggacgttcatcctcgttaaagccgtagtacacttcttcttgttccatatcgtcttcgctataaagcaagaattcatcagtctcatcaagcaactctgcagtagcttccaaaagattttccaaaccttggtgagccaaacttgaaattgggaaaatttgtggcaactcatcaaattcatcatagttagcagccaatttttccttaaactctttcaagttttcctcagccccaggcatgtccatcttattagccacaataatttgtggacgttccatcaagcgaaggttataagtttccaactctttgttaatttgaagataatcctcgtaaggatcacgcccttcacttgctgacatatcaatcacatgaaggataacacgtgtacgctcaatatggcgaaggaactgcgttcccaaaccaacaccctggctagccccctcaatcaatcctggaaggtcagccatggcaaagctctcacctgacttcgtacgaaccatccccaagttaggaacaattgtcgtaaagtgataggcaccaatctttggttttgctgctgttaccacactgaggattgttgatttaccaacagatgggaaaccaaccaaaccaacatcagccaaaatcttcaattccaattgaagttcacgttcttctcctggttcaccattttcagcgatttcgggagcagggttacgaggtgtcgcaaaacggatatttccacgtccaccacgtccaccgtgagcaacgacaaactcttggccatcctcaaccatatcagtaataaccttgcctgtctcagcatcacgaactgtcgtaccaggtgggatgctaacgatgaggtcttcagcacctcgaccgtgcattcccttggtcatccctttttcgccattcttagccttgaatttacggttataacggaaatccataagggtacgtaagccttcgtcaactttgaaaatgactgagccacccttaccaccgtcaccgccccaaggaccgccattgggtacatatttctcacgacggaaggcaaccattccgtctccaccacgaccagctttgacactaatcttggctgtatctaaaaacatactcatctatatttctctctttctgatttgtatgccatgtataaattcaatcacaaacgaaagaatttccgacatacacaaaaaaacgcttgatagcgtcttaaaggacagctgcgactgcttggaaaatcaatgccccaactgttactaatagcataatcaaaacgaccaatactgttagacgttcaaaaaatgatttcttacgtggtccgttatctccaaatgccacttgaatttacctcgttttttcttctaatatttcacaataatagtaacaaaaatctgcctatttcgcaactcttagactagcttaagccaaaggaattccaaaaaccgttaaagcttccaactcctcctcggtcaaacgtcgccaagcaccgacttctaaatcattgggcaggcttaaaggccccatacttagacgttgtaactctgtaacttccttaccacaagctgctaccatacgcttaacctgatggaatttcccttcagcaatggtaatctgaaccaggctagtcccagtagccctatctactgaaataatttctagtttagccggttggcaagtataatctttgagttcaattcctttttcaaaagccagaatatcctcctgattcatgattccatcaaccttagcctgataaatcttatcaacatgcttcttgggagacagcatggcgtgagctaagtcaccattattggtcaaaagcaggagaccgtgagtatcaatatccaaacgtccaacaggaaagacctgcttatgtctggctgtatcatccagtaaatcaagcactgtcttgtgacgagcatcctccgtcgctgaaataacaccctgaggcttatttaaaagatagtaaacaaaggtctcgtgtgttaatacttgaccttgaaaagcaatctggtcttgattctcatcaatctgagtcttgggcgacgtctccacctgaccatttacggccacttgcttctttttgagaaaggtcttgacttgactgcgactaccaacaccacaatcaaccaaaaacttatccagacgcatctatacttcctcctttattggaatccaaacttccatctcataatcttcagcctgacgattccctggtggataaacctctacagttggctgatcaatcatttcaaaatgtttcttagcataatgaaaactctcccaaacagctgctgttgcaggccctctaagtttaaaaaccgcataagtagctggtgcaagagcaatcatttccatactatcatcctcaccagccaaggccgttacataagtcttgcgactgccatcattgatccgaataccataggtaggaacagccaaatcatcttgctctgccaaaaagggtacccaaaggaagtctgttggcttacctagttcctcgccctcaaaagccatccctgaaaaactcaaaaatcccttttgaacaaccttcacatcataacgaacggttactaaatctagcttttgaatcacctttttcagttttgtcagttcaactggaacctcatccgctaggacataggaaatcctttctacaaatgcttctttttcagcattaccagaacctataggaaccaagacccaatcttctgctgtaacactttgatcttcacaaaggtaggtaaagtgctttcctccttcgttaaaagacacatcagctaaacgaaaaaggggctcaggcaaatcgataaccaccatctcaagcccctttgcttgaaacaaaagctcttgatcccttaaacgcaccttcatagccaagctatcactatcaatagaaaagctgttatccaagtccattacagactgaaagaaggcctggtgtaaccctgaaaaagtccagacagcatgccaacgacacatcatctcataatcatcaatggtcacaagaagagagagttcctgctgatctaacgcataagaataggcttgaacgctcaattggtctggtgtcaggtagtcattaacaaagaccgcaaagtcatccatggtttgaaaatctgacataaacgctccttttctatttctcgaccgagcctgtcacatacatggtaaatgtagcccttgtaaggattttctcttcctgattagtaatgacaacttccaccaccttagtcgtcttaccattatgaacacacaggccttcaatcttgagttggtcagacaaatgccctgccttgagataattgatattagactgaagcgtcaccgcatagtcacctgttgaaatggccacgagccctgcgacctgatcacaaagcgtaaacaaataccccccgtgagcattaccaaaataattcagtgacttctcgactaccttagttgtcacgatgacatgtcccgtttcaaatagttcttcttgaaaattctcaaatacacggatttcatgtagtttgtcttgcatagcaagccctcctattgttgctcattccacacctagtgaaatgacacgtctttatctactagtataacacgaagttcataaaggatagtaagcttatttggctaagctaatatcaacctgaatatcttcacgaaaaagcttcttcactcgacaaaaattatccacaaaagccaagagttcttgctcattttccaaaatcagatcctcaggtaaatgaatggcaagggtgaaatgcccttcttcatagttggaatcaacttgaatagcaagctcctcgattccctgatacttggcaaaataactctgtagacacatggtcacacaggaagccaaggcaatattcaccaagctcatcggtgtttccccatcatccgtgtagccaaaaagttccacaggtgctccataaccctctgaaagcgaatggaaacgtttgtcacctttaattgttgtttgatacatcatgtcacctcaatctttttttattattataacaaagagagccttaaggaccgagctgaacgctttgaaatatctatcaaaagaagaaaaagcgtaagagtttttagctcttatttttcaatagattagccttgtacaacactggcattactaagggattacagttgagtaaaagcgactggaagcgcttttaaaattatggtaattcatttaaaatgaatttactaagaaaaaagggagactattatgaaaacattttctaaattaactttagcctctgtctcagttcttgccttgttgaccttagcagcatgtggcaactctaaagacaaaactgactcgtcatcttcagcaccatcatcaagtaaggtgaccaaagaatcttcttcaactgattcaagtgcttcagtaaaagtcaacaaagacggatcaactgaggtcagcgatggaaacggtaactcagcaaaaacaaacggtaataatactgtcgaagccaacgatagcgaaggtaacagtgcaacagttggtcaagatggctcagtcgacgttaatagccaagacggtacaaatgtcaaagttggatcagacgggactgtctcaattggtaactaataagataagataggctagctaatctgctagtctattttttaggttcagattgatgtaaacgcttcctgaaagtgctataataggcgtggaaatgcaaattcaggaggtgagataatgaagaataaaatcatcttaggatgcttggctgcagcgacctgtgaaattctctttgggctcagttttatctttaccaaatctattacagcacaggtcagtgacctggctttaatctcttggcgctttgtcaccgccttcctttttatcaacctctatttcctattcagccgacgtcggctaaacattaacggtagaaatcttaaacctctgacacgtattgccattctcaatccgattatctattttatttgcgaaacgattggcattcgtatgacgactgcttctgaaagcggagccttcctcgcctgtatcccagtcgttgcccttatcatgtccagcctaattttaaaagaatggcctagccgttggcaagtggtcggtgtcatcacaacccttgtcggtattatcatggctgtctttgctgctggcggttctactcacttctcccttgttggctacttgattctagggctagcagtcatctcctacgccctgtattgcgttgatgttgaaagggcaagtcaattcaccagccttgagattacctattttatgcttgccagtggttgcctgacatttggactctttgcactcagccaaggctttctagctggctacttaaaagaactcttacttcttcctttgaccaatccaaaatttacaatcactatcctttatcaaggcttgggatgtagtgttctgggctatttgctatcaaattttgccatcgccaatatcggggttaaccgaacagcttccttcattgggatttcgacaattatatctattctagctgctgttattgtcttaggagagcccttctcacatctacaaatttttgcaggaattttagtcgtcttgggcgtctatgtggccaataaaaactaaaactctcggtaatcgatcttccgagagttttttagtcttaatcaagctctgtttgaatcaaaacgacgagttcttcctcattaggaatactacttaccgcagtcggcacaggtaaatccttatctccatagcccttaataatatgtgctaaaaacacagatgctttcgtcatggcgacaggcaaagaatctgccctaatactacgaccaaaatcaggaaaactaatttgataaccttcctcaatcgtgtgaaaaatcgctggatattcgtataacatgtctcttcccccatttcaatactagacccctctatgataggatgagttggaaaagaagtcaaccaaaaatcgatatattgggaagcgaaaccattcgaaacaatacagcaaagttaaaataaggcttagtccgtattcaacttgaaaaagtggcaccgattcggtgcttttttgatacacaaagagtcccttggaatcatccaaaggactctttttatatttactatttcttaaccttatccaaaatctcaatcaccttatacaaatctggttctgtgatttggtagggagcttgttcacgaacaattggtttggcacaaaaggcgatgccaatgccagctgtcttaatcataggcaaatcattggcaccgtcacccattgcaatggtttgcgagagttcgagatcattttctgcagcccaatctttaagtttggcaaccttgacatctttggtgacaatctcaccataaaccttaccagttaagacaccatcaaccacctctaagtgattagcctttacataatcgattcctgcttcagctgccagtctatcaaccgtctcatggaagcccccagaaaccaaacctaccttgaagccacgggcgtggagttcatccacaagctccttggcacctttgttgaaatgaatacgagcatagaccttatcaaatatactctctggcagtcccttaagggtcgccacacgttcatttagggcctgtctaaaatccaattctccacgcatggcacgctctgtgatttcagcaacctcttgaccaacacctgcttcttctcccaataaatcgataacttcttcttggactagggttgaatctacgtccataaccaataaacctttaacttctgacataattacctcgattctttgatgcctatctaaacctacactggatttaattttaatatgaaatgaaaaacggaccttacaaaaaattctggaccctagtccagaatctttctcttacatacgaatttgttcgcgagtcttttcataagatgatacaaaacgatctgtcacacctggttcaactgtttccaaggcgtaagagatttcttccaaagatgcatcataatcatggtcaacttcaaacaatttaagggcatgctcaaagctactttgaaccgcaggttcgaacgaacggtagcggtttgagtattgcaagagttgctcagtcaaggttgcattttgaacaaccaagtaagctgtctcttccaaatgatcaatggcatttttagatgtttctgtcaaacgcattaccgcatcaatattaatacgtccacggctgagttcatccataagagcctcaatttgagcacttgttgagaagaagacactcaagaaggattgaggaatacctggaagattacgtttttccatgtaacgcttgataacatgcaatttattaacataaatatcaagttcttcacgtgccttagcttcgtttttctcaatagcctgaagtttttcaaagacctcaacctgaccattttctacagcagacaaagtattgagactcttttcaaagatcttttcaagttctgagaaaggtttcacctgagtttcaaaattttcaagggttggcaaaacagcagtttccacacctgaaatatctgaagcgaagctacgtacatctgctgcataggtttcatcgaaaatgtaagtcaacatgagacgctcaagctcttcttgaagtttcttgttgttttctttagcatgcttgagataatctggcaaaattttcttttgacgcataacaaccttgtatgatgcaatttcacgttcgaaaatgctatacaagttgtcaatcttttcttgaatctcagcgttttcttcttccgcacggtccaaatcaagagaaaccaactcacttgagtttgaacggatagcttcacgaatttcttggaagcgacgttcaatatttttctcagggaagtggtaattttgctcaatcaacttacggtagccagattccaaatcatccaactgatctgggaaatcatcttccaacttagctacaatagcaggaatcttctctgaaatttgacccaatgcgatggtgtgttcttctgcacgatccaagatgcttgaggcctcaacagggtcacctgatgagttaagagtcacgaattcagcaaattcagcttcaatgtttttaagctgtttattgatttcggtcatggtagaaccgaaattatcagagttttcctcgattgagttttgcaactcttcgtacaagtctagtgcatgcttaacacgagcactgttcttttcttcttgttctttcaaggttgagagcgcctcgcggatagacttgatatcttcttccacaagatccaactgactctcaatattattgatttcaccactagccttgaagaaatggaaggtatcgttcatattttcagcttcaaaaatatgattttcaatatctgcgaatgaatttgttgagatatctatccatttctggttccattcacggaaggttgtttgactttgtccaatcaagtgaagctttttgacttcttcaatctcttcattaactggcaagtcaaacaatttttgcttgcgttcttcaagctctgcaatccgcgaatcatttcgttttctgataagaataccgactaagtaagcgataattacgagcataactaccactacaatcagtaaaacaattccgctagacatagtttctccttaatcgtctattatgttcataaatgtagaataacattacgattatatcatagttattctagcattgcacccttttctaaaagaatattagatatctagagtactgtaaacggcattttcttcgataaattcgcggcgaggttcaaccttgtctcccatcaacatatcgaaaatcttatctgcttctgcagcatcatccacagaaacacgtgccatcaaacgattttcagggtccatggttgtttcccaaagttggtggtcatccatttcacccaaacctttataacgttgtaccgtaggttttgaacgtcccacactatacttttcaagagcagcacgtaatttttcttcctgatctgcaccaggttggatgtattccttaatttcagaaccaaccttaaccccataaattggtggctgtgcaatgtagacatagcctgcttccaagactggacgcataaagcgataaatcaaagtcagaagcaaggtacgaatgtgagccccatcaacatcggcatcggtcatgatgaccaacttatggtaacgagccttgctgacatcaaattcagctccaaaaccggtacccatagctgtgaaaagcgaacgaatttcttcattggctagaatcttatccatgctagccttctcaacgttcaaaatcttacctcgaattggcagaatggcttggaattcacggttacgacctgacttagcagaaccaccggctgagtccccttcgacgatgaaaagttcattcatttcagcattatttgatgaacagtctgccaacttccctggaaggttagaaatttcaagacctgacttcttacgtgtcacttcacgggcacgcttagcggcgatacgagccttagaagccaaaatccctttttcaacaatcttcttagcaatggcaggattttccaagaggaagcgactcaaagcctcactgaagaggcgattggtaatcttaaccacttcagagtttccaagcttggtcttggtttgaccttcaaactgtgggtttggatgcttgacagagatgatagcagtcaaaccttcacgaacatcatccccagtcaaattatcatctttttctttgagaatcttattctgacgcgcatagtcattaatgacacgcgttaaggctgtacggaaaccttgttcgtgggtaccaccttcatgggtgtgaatgttgttggcaaaactcatcaccgtttcatgatagccagttgtgtattgcatagcaacttcaaccgaaataccatccatctcaccatcagtgtagataggttcatcaaagataacatccttgttttcattgatgtatttcacataagacgtgataccaccttcgtagtgataatgtttctcttgttcgagaccctcacgcttatctgtgatagagatacggagccccttattcaaaaaggctagctcttggatacgtttagccaattttccaaaatcaaactcggttgtttcttggaaaatctctgggtctggcgtaaagtgaacagtcgtaccatgtttctctgtttcaccaattactgctaaatctgctaccactaccccacgtttatactcttggaagtggatatggccatttttataaaccttaacatcaagttgtgttgagagggcattaacgaccgaagaaccaacaccgtgcaaaccaccagagaccttataaccgcctccaccgaatttaccaccagcgtgaagtactgtaaagacagtttcaactgcaggacggccagttttttcttggatatcgactggaataccacgaccatcatcgacaaccgtgatagaattatccggctcgataaagacctgaatatgagtggcgaaaccagccaaggcctcatcgattgagttatcgacaatctcccataccaaatgatgcaacccttcttttgaggttgatccaatatacatacctgggcgcatacgtaccgcttcaaggccctctaggacttgaatctggctggcatcatattcttgcgctttttcttcaagattttttaattcatcagtcatttatgtcacaatctccaataatgatttatggccatcaacaagcaaggtatccagacctgctgcttttcctgcctctatatctatctggcggtcaccaatgaccaagccatgtttaatatcgtatttgttaattaaataaaggaaactatctggactcggctttctagcgaagccattttcagaagttacaacctctgtaaaataagaggcaatttctgctttatcaaggatttctagcaccaagtgattacggtgactaaccaaaaaattacgcccaccctcagccacaatcttagcaaggacagccttagcaccttcaaaaagaacaggttcctgtaaatgctcggcttcctcctgcttatatagggttcgaaaatcagctatatcaggcgcaaacatagcaatggcagtgctcgttgataccttaagggcatcatagactgcttgaggctctgctgtacgctcaaattgttctaaagttgctagaaaggcttgggttgatacctggtaattatccaacaaggtaccacccaaatcccagatataatctccataattcataaccttaattataacataaaaggtcagattttgcttgtttttcacagctaaaaaggcttggaaaacctatccaaaccttaattttttatttcagaatcaaacttgccacaataggactaataaagacatatagaatccctgttacagcgattgaaagtccgcccatggcacctgcaacttgaccatatctgaaggcagctccggtacctacggcgtgtccagttcctccgagtgaaagtccgatagcaactggatctttaatgccaatcatttttaagaagacaggacccaagacagaggttaagatacccgtaataacaacgacaaccaaggttactgtcgtaatcccctgcattttttccgaaattcctacagccatggcagtcgttacagacttaggaaagagagagatggctaggaaataatccatcccaaaaagcttagcaatcaaggccgtataactcgtatttaaaacacaggcaacagttgatccaattagaatactcttatagtgatggcgcatgaggtgtagatttttataaaaaggaactgctagcgcgactgttgaaggtataatcaaactgttaatataagagccacctacatagtaatccttgtaggaaatacctgtatagtgcaaaatgacgataatcaaggcagtcgatacaagaagaggcgttgtcaaaggattaggaaaacggcgataaatcaaaagccctattgtgtaagctagtacagaaagtgttagcccaaacaagggtgtattaaaaaaattagccacgtttaacctcctcgtaatcaccttcaaaatgttttttgatgaaaccgacaactactgcaattactacaatattaagaaccaaggctcccataataatcaaaataatagggacaatattcgctgaaatagcattccatcgttccataataccgacacctgctggcaaaaatagaatagtcatattggcaatcaaaaactctgctactgcatgaatatgacgtagacgaatccacttaagctgaagagcaataagaagcaagaataaaccaataatgcttccaggaataggtaatttaaagaatgttgaaatagcttcaccaataacggcaaacaaacaaatcaacatgaattgaacgtagtatttcacgacttgcctcctaggtttaatcacctattagtctactcctttttttttgaatttcaagagttttcagtaaattcttttgaaaaattaagagccataaatcagtcgctttgaacataaaaaaatccaaccctaaggctggacttcatcacagatgccaccaccgagaattgaactcggaacggagcattaccattgctctattataccatttaactatagcggcaactgtttttatcttaccatacttctatttagtgtggcaagattttttgcttattttttataaatttaagtcttggtaaggtgtacggtaaccaatctgtaaaaacttaccatccttaatcaagataggacgtttaatcaacattccatctgaagccaagagattaacagcttcgtcaacagatagtgttggtagtttatcctttaaccctagagagcggtaggactgtccgctcgtgttgaagaatttcttaagctctaaatctgaccctgctaaaagctcttttaaaaattgagctgaaggtggattttccttaatattaatagattcaacatctaaacctaattggttaagttctgctttcgccttacggcaagtgctacattttggatattcataaaaagtgtacatgtttttctccttttttctagcataagctatctctctgggactgtcaaacctgatgtcttctaaatgcagtagaaaacacttagcttcttctcctgctgcataattacctatctgaccaccactaggcaagacacgatgacaagggaccagaatcaaccaaggatttttaccaacagcagttcccacagcctgtgcggatttgcaggagatttgctggctaatctgtccatagctaatggtccgtccataaggtatctcccctaaaactgaccagactttttgttgaaaatctgtccctctatcagctagaggtaggatatctggacttggattatcccccttaaaataagcctctaaccaattcttggttattttcaagatagaatttgaggtgtctactagctcctcttccttgatccctgcctgaaaatgattttgtccttccaaccaaatgccataaagagactcctcgctagccaccaaagacaagcggccaatgggagataaataatactgacgataaagcatgtcattattataacaaaaaagacaggaatctcttgttcctgccagtttaactcttattttttgcctttaatcaaacgcacacgtacgatattgtcgctagcctcaaacttagcaaccaattcatcaatcttttccttatcagtttcatcaaggtcaagaagcgtataggcgtaatcacccttagaacggttgatgatattatcaatattgatattaaaatcagaaaccgctgtagagatacgagccacaatattaggcacgtttttattaatcaaggtgatacggtatggagcactcaaggcctgttgcacacgtgggaagttaacagagttaacaatttcacctgtttccataaagcgacggatagtttgaccagccataatcgcacagttaagttctgcttcacctgttgaaccaccaacgtgtgggaagactgttacattaggtttgttaagtaggtcttctgtaccaaagtcagtgatataacgtttaaccacacctgtttctaaagcatcaaagagagcatcgttatctaccaactctgcacgggcaaagttaatgatagttgtgcctttttgcatgagattgaaggcatccgcattgaaagttcctgttgtatctggtgtcaatggaacgtgaacagtgatgtaatcacagttttcaaaaatttctttgagatcagaaacacgtctgacatggtgagaaatattccaagctgcttcaatagaaacatatggatcgtaaccatagaccttcatacccaaacgataggcatcattggcaatacgagcaccgatagcaccaagcccgataacaccaagggtttttccagcaatctcgctaccagcaaactgcttcttacctgcttcgatttgtttaggaatatcatcaccagacaaggtattaacccaagcattggccgcaatatagtcacgggctgagagcaagatagaggccaaaacagcttctttaacagcgttagcattggcacctggagtattgaagacaacaattcctttttcagttgcttcgtcaactgggatattgttagtacctgcaccagcacgcgcaatagctttcaagttgtcaggaaaaacagtgtcatggagattttgactacgaatgatataggcatccggatttttcgctaaatcaccatcaatttggaaatgatttccaagttccttcaaaccaatctggttaatattgttatacgtttttacactaaataccataattttattcctcttaaatcaatgtatcccgtggtgagctgcttcatcaagttcttgataaaaggccttctctcgcttagttttgattttctgataagcaagacgttcaccatcaataggaaccttgccacaatagacatagccaagcttctccaaaatatgctgcatgacagtattcttttcatgcgtatcgcaacggaaatcatgagcatcagtcccctcaataagaccttgaatgaaggtttgagcaataccctggcccgaaaattcacttaaaacggcgattctatgaaaagtaatgtagcgcttattgtggtgtttccagtccccgtcatagattttgtcgtaagcagggtctccatcaacaatcaccgcagcataagaaacgatttgaccatcaacaattcctacataggcctgcccattaaggacatcgtcaaagatagtttcttcagtagggtaaccatcagctccttgccattgggtactccccgcttctgctaaagcagttctagcactctcaatcacagtcatgatagccccaatttcatttgggaaggcttgtctaatttccatctctttacctaattatttattttcggcttcaaatttcttcataaagtcaatcaagtcaagtacaccctgacgtgggaatgcattataaacactagcacgcataccacctactgaacggtgtcctttgatattcttgaaacctagagcatctgcttctgctacaaatttagcatccaactctttacttggtgttacaaatgggatattgcagacagaacgatccttggcatctttgacaggatttgtgtagaaatcagatgactcaatgtaatcatagagaagtcctgatttctcacgttgaatttcagccatcttgtccacgccaccaatttcatttttaacccagtcaaagacgagttttgaaatatagatgttgaaacatggtggtgtattgtaaagtgatcctgcttcagcttgaatacggtaatccaacatggcagacaattgtggttggtcgttaaggaagtcttcacgaacgataaccactgtcaccccagcaggtccaatatttttctgagcaccagcatagataagggcaaagtcctcaacattgtaacgagcagccaaaatatttgaagacatatcagctacaattggcacaccattagtatcaggcaaatcgtagatagatgttccttcaatggtattgttcgttgtcaagtgaacataagcagcttctggatcaattgttgctgggtcaaagcttgggatgtgatcgtaaacagtttcttctgaagaggccaaaagaattggttcaaaaggaatggtttttgaaagtttaacagcttctgtataagcttttttaccccatgaaccacctacaaggtagtaagctttcttaccttgagcgaggttaagtgggaccattgtaaattgtgttgaagcgccaccttgcaagaaaataaccttatagttatcaggaatggccataagctcacgaagtgtcgcttccgcatctttaacgattttgtcaaattctggagaacggtgggacatttctagcacggacataccggattcttgatagttaagcaattcagcttgggctttttcaagcactggttttggtaatgtagcaggtcctgctgagaaattataaattgtcataaagacacctccaaaattttaatggtcctattatagcgaattttctgaatattgtaaagtgttaacagtaaaaaacgaacgggattaaccgatcgcctcaaaaaagttaggtattttatgtatattttcatcagtaattgattttagtatccgtttatttttgcttaagaaaataggctgccccaattagattagctccattatgatgatgacaagcaacaatctcgggacgtttaataattttaccgataaagtcaatctcatggtgaaccttatcaaactggcggttgacctcctcgataagaatcggctgggctgaaatgccacctccaataacaaaggtttccatatcaaagatagtttgaagattcaaaatggtaatggctaggttacggcaatagctttcaaaaagcggatagactgttttatctccttcatttatggccttaaatgcggctaaaccatcctttaaatctgagttacctagcacttcatttaccttggtaattaaaccgacagccgacaaagtcatgcctcgcatcaatgaaggatcaactttttccatttgaactggtaacagaaaggtcaactcacccgcttgaaaatgacttccttgaaaaagtttaccattaataataaatccaccacctagacctgaacccaaaacaagagctgcaccattggccactccttgcaaatgacctgtagctagctctgccaaggccgctgctttaccatcattaagagccatcacaggcagatggtacttggcttcgaggacctctttaatacgaaagccgtggaagaacctcaataagccaccatgataaatcacaccttcctcagtatcaaccgtccctggaacactaattgctatacctgataagtctacttcaactgaagtaactatctgatcaatcacgtcaatagcttgttctaagttttgtggggatgactgcgtcggcagactcttttcaatggcgaactgctccgaaacaagtgctgacttcacctgtgttcccccaaaatcaatcgctaaaatcgtcataagcatcctccacagattgtttttcgtcattataacacaaaagagcaaaaactagaaaaaacggttccaaaatgctatcataaacttacagaattagataaaaggagttatctcacatgactaaatttctacacacttgtgtccgtgtcaaggacctagaagcctcacttaaattctataaagaagctcttggtttcaaagaagctcgtcgcaatgattttccagaatataagttcacccttgtctacttgcaactcgaagatgatcctgattacgagttggaattaacctacaactacgaccatgaagcttatgatctcggagatggatacgggcatatcgccgttggtgttgatgacctagaagctacacaccaagctcacaaagaggctggctatactgtcacagacctctcaggtcttcctggtaaaccaaaaatgtactactttatcactgatccagatggctataagattgaagttattcgtttgacgcaattcctagaaaaataaaacaaaaaaagtcagattgtatagatctggcttctttttgtgcttaatttttattatctgtctttaaggctgacaaaatttgggtacgaatatcatccacaccgtttggattatttggtaggaataaggtttgattgcctttagccgcaaaagtattaagggtatctagatattggttagtcaagagaatagacataatctgctcttcagacatacccacattggcctctttaagttctgcgatagattcagccaatccatcaacgattgccttacgttgttgggcaataccgaccccgtgaagacgatctttttcagcttcggcttcagctgctgtaacaatcttgatcttatcagcttctgccaattcttgagctgcgacacgcttacgttgggcagcattgatttcgttcatagactgtttaacttcagcatctggttcaactttggtaatcaaagtcttaacaatgatatacccataagttgtcatttcttcagccacttggtgttgaacctcaagggcaatttcatctttcttctcaaagagttcatcgagcgtcaatttaggaactgatgaacggagagcatcctcaatgtatgatttaatttgagcttctggacgcatgagtttatagtaagcatctgtaacattttgctcattaacacgatattgagtagccacattcatcatgacaaagacattatcctttgtcttagtctcaaccacaatctcactttgaagcaaacgtaattgaatacgagcggcaattttatcgataccaaatggtaaacgcatatgaatcccactcgttgcaattttttgataacgtccaaaacgttcaacgatagccactgactgttgacgtacaacgtaaagcatactaatgagaattcccaaaataatcaggaaggaaaacagtaaaaagagaagtgctgcttgcatgttaagtcctccaaaataaacattaaaaatttctttgctttattatagcacagcaatacaatttttcaagaaaaatagtatggctcatttgaaatagtgtaaaagagacactttctttatcgcttatgtgttagcactcctgaaaacttggaaactcctgttagtcgagaaatttgtccgcaataggcgagacttttcgatgtaagaaaaaggctgaaacgattgcgtttcagcctcttagtattttcgaaaataaaatcgttggaagaatcattctagatggcatctaaaactcaaatctcaaaagacttatttacgatacatcttgacttgaaggtaaatatcgttatagattcctagccatttttgtcccaagttgttatagacttcaaggtttttaatggttgattctgagggataaaaggctttatcatcagtgatactctttggaagcaaggctttagctgcttggttaggtgtggcataaccgatatattcagcatttttggctgcattttctggtttaagcatgaaattgataaaggcataggcctctttttcatgctttacagtcttaggaatcaccagattatcaaaccaaagatttgagccttcagatgggacaacataacgtaggtcctcatttttatcaagcatctcactagcttcccctgagaaggttactccaatggccgcatcaccttgaaccatgtagcccttcatctcgtcaccaacaatagccttgatatttggtgttagactattaagtttagtttcagccaaacgtaattcagtcatgttcttcgtattcaagctatatcccaggctattgagtgagaaaccaaggacttcacgcgcaccatcaactagcataatctggtttttgtaatctggtgaccaaagatcatcccagtgctgtggtgcttttttcaccaattttgtattataaacaataccgacagttccccagaaataagggatggaatagtcattgtgagggtcaaaactaagtcctttaaagcttgggccaatctggtcaaaacctttgattttagatttatccaacttcaccaaaaggtcttccttaaccattttatcaatggtatagtctgacggcacagcgatatcgtaggttgttccgccctgcttaatcttggtatacatggcttcattggaatcaaaggtttcgtactgaaccttgatgcccgtttcttttgtaaacttggtcaggaggtctgggtcaatataatcaccccagttatagataactaatttgtccgacacatttcctgtacgactctgcatgtaggcagagatgccccaaaggaagaagataatggctaagatacctgccagaaattgatagagtctacgcatcctgctcctccttctccttggtaatcgcataataacctatcactaaaagaatagagaataggaaaacaacggttgacaaggcattgatttccagagaaatccccttacgtgcacgtgagtaaatttccacagcaagtgttgaaaaaccatttcccgttacaaagaaggttactgcaaagtcatccaatgaataggtaaaggccatgaaataaccagcaataataccaggtgtcaagtatggcaacataacctcacgtaacatctgccattgagttgcacctaggtcataagcggcattcaccatatctcgattcatttccttgagacgtggcaacaccatgagaaccacaattgggattgaaaaagcaatgtgactcaataagacagatacaaagcctaattggaaaccaatcaaggtgaagagaatcaagaaactagcaccaatcatgacgtccggtgcaaccatgagcacgttatttagggataaaatcccagtctgttgcttttgtttactctcatagataaagatagacccaaaggtaccaataatcgttgctagaagagcgctaaggaaagctaaaaagaaggtttgagtcagaattaacataagacggctatctgaaaacatgctctggtagttatccagagtaaaacctgtgaaactattcatatcgccaccactgttgaaagagtaggcgattaaataaaagattggcaggtaaaggataacaaagacaagagctaaatagagatttgcaaattttttcattgacgtctctcctttgttaaccacattgtcgcaatcatagcagcaataagaacaacaccaatggttgcccccattccccagttttgtgtcgtgaggaaatgctgttcgatggctgtccctagggtgataactcggttaccaccaatcaagcgtgtcagcataaagaggctgagactaggaatgaagaccgactggacaccagagcgtaccccattaagcgataagggaaaaataaccttggtaaaggtctgccaatcattggctcccaaatctttacttgcattcacaatattttcatccaaatcatccagtgcattgaaaatcggtagaatcataaaaggaatttcaatgtagctagctacgaaaataaaggagaagtccgtaaagaggatttgcatgggtgcaatcccaaagaaaccaagaaaggcattgataccaccttgttggccaaaaatccccataaaagcataggctttcagaaggagattgacccaggttggcaaaatgaccaacattaaccaaagttgcttatgcttcagtctggttaagagatatgccgtcggataagagataaggagagttactagagtaatgatggctgcataaagaaccgagttaaaactcatccttaagtaagtccaactggaaaagaaggtgccataattatccaatgtaaagttgccactgatatcaaagaaagactgatagagtagcatgagcactggagcaaccacgaagagtaggagccaaaggaggtaaggtaccgagaagaggctagctgttttcttcatagcgctcctcctcaatggcattaatcaagccatcttcatgttcttccacttccacatattcttcaatacgtgcatcgaactcttcttctgtctcattaagacgcatgatatgaatatcctcaggcgtaaaatcaagaccgataatctcaccctcaatcgccttacgggttgaatgaatcatccattcattgccaagattgtcataggcaatgatttcatagtggaccccacggaagagctgagtttccacgcggacttgtaatttgccttcctcaggaagtgtaatctgcaaatcttcaggacgaataaccacttcgacaggttcgttaggacgcattcctccatcaacagattcaaaacgtttcccattgaactcaaccaaatagtcctcaatcataacacctggtaggatgttagattctccaataaaggttgcaacgaagtgattaataggttcgtcatagatatcaaccggagttcctgattgaacaatttctccatcgttcataacaaaaatccaatccgacatggccaaggcttcttcttggtcatgggttacaaagacaaaagtaatccctagacgttgctgcaattcgcgcaactcgtattgcatttcagtacgtagcttcaaatctagtgctgacaagggctcatccaaaaggaccacacgtggttggttaattatcgcacgggcaatggccacacgttgacgttgaccacctgataatttttgaattgagcgtttttgataaccattgagttgaaccatctttaaggcttcttctacacgctcttcgatttcctttttaggcacctttttcaatttaagggcaaaagccacattgtcaaagacattcatatgtggaaagagggcataagattggaaaacggtgtggacatcccttttattgataggaatatcattgatacgctttccatccaaaaggacgtcaccactggtcgcatctaagagacctgcaatgatgttcaaaattgttgatttaccagaaccagaagccccaagtagggtataaaacttaccttcttctaattcaaagttgatgtcttttaaaacttgtgtgccactgtcttcaaacacttttgagacgtttcgaaaggcaataatcggattagtcaattgtcataaatcctccatggatagcaaatatagggatagggttttattagtttaatttgtcgccaatgatacgtacttcaggctctagtgtaacacctgaattttccttaaccttggcgataacatctgcaataaggttttcataatctttagctgttccttgatcaacattgaccatgaaaccagcatgcttagttgacacctcgacaccgccgatacgatgtcccttgagattagcttccataatcagctgacctgcaaagtgacctggtggacgtttaaagaccgaaccacatgaagggtattcaagaggttgtttaagctctcgcaagtgattaagacggttcatctcattcttgatttgctcgtagtctcctggtttgaggttgaatttagccgaaataaccacttctcctgtttcttggagcactgaacgacgataaccaaagcgcatatctcttgcgtcaatcgtacgaatatcaccgtcttttgtaagaacctgagcagaaaccaagatatgggcaatctcgccaccataggcaccagcattcataaagacggcaccaccaacactacctggaatccccgctgcaaattcaaaacctgtcaaactttggaaacgggctaccttggttgtcgcaatcaagttagctcccgcttcagcttcaatttgataaccattaactgcgataccattgagcctgtcaaacataatcacaaaacctctgataccaccgtcacgaacaatcaagttactggcattaccaagcaccatccaaggaatgtcatgcttattagcaaatttgacaatacgagagagttcatagcggttacgtggaaaggccaaataatcagctggaccaccaaccttggtatatgtataacgttttaagggttcgtcgaaacgaacatcaatccccactaaatcttctttaagttcatctaacatgttattttccatacttttctatacattgttttctttataggtatcgtgatagacttccccatattactatcactacctaaaaatgagtgagtatttttccctaaaaattagaagaaaaatacagcaaaaagccaagtttaattatagcaaaaattccccatcttgacgacaaggaatttcacgcaaagctagtccataagctccaatttacggacatcactagtgtttaattgactcaaataatttttgtaggcttgcccagttttggggtcaaccaaatcatctgctatttctactaagggcaccagaacaaaagctctctgactcatatatgggtgaggcactttaaggtgctcagtctcccagatttcctgcccatatagaagaatatctatatctaccgtccgaggcccccaatgttcatgacgaacgcgatcaaggtctttttcaatttgctgacatgaccttagtaaggtctctgctggcaacttcgtctctaaagccaaggcaagattcaaaaaatcagcctgatctgtcagtccccaagcagccgtttcataataagaggataccgctttaacctccgtctcaggtaagtcattcaaggccttcacagctttttgaagatagccttgacggtctcccatattagatcccaaactcaaataaactcttgtcatcggctacgctccaattcgataccaacactcttataatgcccattaattggtggattttccttggtaattcgaactttaatagattgaattggtggaaattgtgcaaataaatcctcacaaattgcaccagccaaacgctcaatcaaaatatactttttatcttccacttgtttttgcacagcttcaaaaaccaatccatagtgaaccgtatcatctagattgtcactctgtgaggccttggttaaatcaacagccaattccaaatctaccacaaaaatttgccctagggtctgttcctcagcaaaagccccgtgatagccataaaaacggcaaccatttaaaataattttatccataatttctccttcagacgactagactcctctttattctagcacaaaacagttgaaaagttggactcttattagtatgatattttagacagatctgaagttattgtgtttacgcttatgcaatcggttgcgtaattcttctgatttggtaaaatataggcacaggagtttaaaaaactcctaattacaagcaagactatctcaactaataaggaaaaaactatgacaaatcaaaccgcaatgcagtactttgagtggtatctcccaagcgacggtcaacactggaacaatttggctgaagatgcccaacatttagcagacctaggcatcagtcacgtttggatgccacctgcttttaaggctacaaacaaagatgacgttggttacggcgtctacgacctctttgaccttggggagttcgaccaaaaaggaactgttcgcaccaaatatggcctcaaagaagagtatctcaatgctatcagccaactcaaagaagttggtattgtacctatggctgacgttgtccttaatcacaaggcagcagccgataaactcgagaccttcgaagttgtcgaagttgacccagaagaccgtacccaagagatcagtgaaccttttgaaatcgaaggttggacacacttcacctttgacggacgcaataaagcctacaatgaatttgaatggcactggtaccactttaacggaactgacttcgatgccaaacgtaataaaagtggtatctatcttatccaaggtgacaacaaaggttgggcagacaacgacttggttgacaatgagaatggtaacttcgactaccttatgtatgctaacctagactataaacaccctgaagttatcgaaaacatttacgaatgggcagattggttcgttgaaacaacaggcgttcaaggcttccgcatggatgcaatcaagcacatcgattcattcttcatgcgtaactttatccgtgatgtcaaagaaaaacaagggcaagacttctatgtctttggtgaattttggaatggtaacgaagaggataacaatacctatcttgaaaagattgaaaaacgttttgacctcgttgatgttccccttcacaacaatctacacaacgctagcacagctggagctgactatgatttaacaacaattttcgatcattctttggtcaaaaatcatcctgaacatgccgtgaccttcgtagacaaccacgacactcaacgcggacaagctctagaatctactgttgaagaatggtttaaaccagctgcttatgctctcattcttctccgtgaagacggtcttccttgcctattttatggtgactactatggcatcgaaggtgaatttgcccaagaaaatttccaagaaatcctagataccttgctctacgctcgtaaagaccttgcttacggagagcaaacagactactttgatgatccaaactgtattggatggacacgctctggcaacgaagatggcgctccattagctgtaacaatctctaatgatgctgctaacagcaagtctatggaaattggtagtgattgggctggacaaaccttctatgacattcttggaaactgctctgatactgtaaccattgacgaagacggatggggagacttcccagtttctgaaaaatctgtcagcgtttggacaattcaagactaagaaaaaaagctcaatcgagctttttttagtatcataaaatccctaaaatggtcttaacaatatcacgattggcatcaacattatgcacacggacaatctgacagcccttgctaacagcatagccagatagagcagccgttccctgatcacggtccttagcttgggtatttccacctagtaggtagttcacaactcgcttacgagaaattccaaaaagaacaggatagcccaaggcaacgaccttgtccaagccttttagcaggtcaatattgtgttggacatttttagcaaatccaaagcctggatcaatccagatattgtccttggccacacctgtttccaaggcagcctgggcacgttgactgaggaatgtacagacatcttctgtgacatcattgtatacttcttctttttgattatgcataaggataatcggcacattcttttcagctgctaaagctaacatctggccatcataaagtccagcccaaacgtcatttagaatatctgcacctgcttcaagagcagctctagcagtggctgtcttataggtatcaatactgatgagcacatcatattttgccttgatagcctgaataactggaacgatacgagcaacctcttcttcctcagtcacaaattctgcccctggtcctgtagattcgccaccgacatcgataatagcagccccctgggcaatcatgcgctcaacctgagccaaggcatcctctactgtgtcaaaatcgccaccatctgagaaagaatcaggggtgacattcaagattcccataatacaggccttacctgcaatctcatgtttaccgataaacatcttaactcctaaaaatcacgcatcaatgaaagaatttccttgcgttcttcacggtcttctttataaaggcccttagcgacagttgtgattgtcttacttcctggtttcttaatgcctcgcatagtcatgcacatgtgctctgcttcaaccatgacaaaaactcctcgaggattcagagcttcttcaagtgctgtagcaacttgatctgtaagacgttcttgcaactgcggacgacgagcagctacttcaacggcacgcgctaatttggaaagtcctgtcaccttgtctccacttggcaaataagccacatgggccttaccataaaatggaaccaaatggtgctcacacatagagtaaaaaggaatatccttgacaaggacaacttcgtcatggacttctgaaaagacagctgtaaattgatccttagggtcttcatttagacctgaaaacatttcagcatacatcttagccacacgttttggtgtgtccaaaagtccctcacgctcaggattttcacctagagcttccaatagttgatagactgcttgttctactttttcttgatttgccataatttcctctttcaacgttataatactatctattataccttattttgctggatttttcttgcaaaaaataagatttcctagctacctaaatctcaaaaaaagcgaagaccacctttcatatagaggttatcttcgcttatattttttagtctttcaagtggtaagaataggatgaaaccacaatattctcacgccatttgagataatatttcaatcgtaaactcatttggttgtgaagcatggtttgccatgattttttaggcacaaactgaggaatcatgactgtcagagtcgcattatccttctcagcttgagtggcgacctcgtccacatactgaatggttgactgagtgattgagctgtacggtgattggatatgaaccatctcaatttcagggaaatattttttaaactcttgttcagtttccttgtccttgttctcagtatccttagtagatacatgcatggcgataaccttgtcaccaatagaacgcgcataggaaatagctccgatattagccttggtaacattcccaacgaggataagaacaatatttccttgataatggtgttcttctaccgctccatcaatacgcaactgttgagcaacaccattatagtgttttttaatcttaaggaacatccacatcaagattgcaataattgggaagaatggccagatatctcctaaacggaaaaggaagagaatgagaacaatagcataacaaatgagagcccccaagatattagctaaagaatgtttccagaatcccttaccatattcacgaatccaatggataaccatccccgtttgagaaagagcaaatggaatgaatacaccgatggtataaagcggaatcaaacgttccgtatttcctcggaaaataaacaaaagggtaatggcgccaattgcaagtgtcaagatcccattagagtatcccatacgtgcccctttttcaaggtacatgtgaggcatgtatttatttttcgccatattaaaggacaacatcggaaaggctgaaaaacctgtgttagccgctactgcaagaatcatggcagtagagaattggaaaacgtaaaatagaatactaccaatccatgactgaccgagaatttctctagccatttgtgacaagatggttactcctgcatgaggtgtaatacctgtccaccagttgaggaaggtgattcccgcaaacatagcccccaaaatgctagacataataaagagggttgaagctgcatttttggccttaggtttcttaaagaaaggcaccgcgttagagatagcttctacccctgtcaatgaggcagaacctgaagtaaaggcccttaaaataagaatcaaagacacacctgtaattggttgtcctaaatgtgctgtggctgcgttaggcatatgacccgttagaatttgaaagaaaccaaatcccaataggaagagcgtcgaaacaatgaagagataaactggtatcatcaaagattttgccgattcacgcattcccctaaggttcataaccatcaaaacaagcaccaaaatcattgatatttcaagattgaaaggatgcaggaagggaagggctgaagtaatggcatctgcacctgaggccactgaaacagcaaccgtcaacatgtaatcgaccaaaagactaccaccagctatcaagccaaacttaggagacagattttccgtcgttaccatataggcgccaccaccttgaggataggctttgataacctgtctataagaaatggtaagactggccaaaaggacgagaaccaaaagtccaatagggattgaccaccaaatagccgcactagatacagctgtcagaaccaagacgacctgctctggaccataggcgatagatgaaagtgcatcactcgacaacatggccaaggcctgaatcttggacaataagtgtccatcaccactatcatcatgagttaaaggttcaccgattaaaatgtttttcagacgttgaaacattgtgatctccttacttttaaaacatacgagggctattatacgcccctaaatgtcatctttcaagtcttaaccatcacttgcctgctctaaaacccattttctgacctgagaaatgaagtatagagatcccgttaccacataaagtttcttattgtcagtcgtcacatgttctttaatccatgttttgaagtctggtacctgcttataagcctctgggtatttatctaatttaacactgtttggatagtcaaaactcgttacagtcaagtcaccaaccgattttagttgggcaagcataccgtcaataggcttggtatcaatcgctgcaaagagaagttcaatctccttattggcatactctgattgcaacaagtcaatcaaaactttaacactctcattattatgagcaccatcaatcatgagattaggtcttaaaaattctgttcgacctcgccaatgggcatgagccagggcattctttatgagttcaagagttactttaggataatctttttgaagcaataaagaagccatgatagccaagctagcatttgccacttggtgttgaccggccatagccaaggctatatcatctaacctttgctctccataggtaaaatcaaaggaatggcttgacccttcagctgtgaaatctctccccagctcataggtcttagaaccttcttcacgcgccttcttctcgaaaacatctcgaacatcagtacggtcagtcgcataaataaagggagccccattcttcaaaacaccagctttttctgctgcaatttcagcatgggtatttcccaaaatagcctgatgatctaaaccaatcgatggacacaggactgccaagggcttaaagagattagtcgaatcatgaagaccacccattcccgcttcaatgaatgcgatatccacaggatggatctgaccaaaatagaggaacatcaagactgtgataatttcaaactctgtcgcattttcatgctctgtctcttttggtagacgttcaaccacaggcttcacacgattaaccaggtcaagtaagtcctcttctgaaatcatctgaccattaagagagattcgttccttgaagtcaataatatagggtgaagtaaaggttccaacttcataacctgcttgggtgaaaatggtttggagggcattgactgtagaccctttgccgtttgttcccacgatatgcacagccttgagattatcttgtggatctcccaactctttaagcatccaagccatacgctccaacccaggcttgatgccaaattttaattgtccatgaatccaatccaacgcttcctgataagtcataattactccttttttaggctaatgcttcaacttagtcattaaaccgacctctaaactagatttctagtttttcctgagcttaatgctttgacgctcttattataccaaagactcctaggtataaccaaaatatgcaaaaaaggcaaccctagggtcacctcttaagctttctctttttcgtcaataacaagacgaacttttttaccttgagtaggtaccgaatagacaatcgctcttatcgccgtaatagtacgtccttttttcccgataacacgcccaatatcggctggggcaagatcaagatggtactccaaaaactcaggaccgtcaataattttgatggtcaactgatctggtgaagcaattaaaggtttaacgatagcgataataagattttcaatggtatccataggctaaaaaattattttgagaattttgattcgtggaatttcttcataacgccttcttttgaaaggatgttacgaactgtatctgaaggttgtgcacctttagacaaccactcaagaacacgttcttctttaagtgttacttggttttcttcaacgagtgggttgtatgtaccaactgtttcgatgaaacgtccatcacgtggagcacgtgaatctgcaacgttaatacggtagaaaggttttttcttagaacccatacgagtcaaacggatttttactgccatttttaatatctcttttctttagttttttattatggtgggggcacttatcgcccctcgaccttaactagtataccatatcatttttatgtgtcaagaaaaaaacttgacagacttaaaatttctacaaaaaaagttagagtcaaactctaacttccttttcaactatttcttagttgtagtcttatgatttttttcataagctacctttgcttcagcatattcagcttctaaacccttagcagctgcttttgatactttctcataagtatcacgactggtcaacttgccatcctcgttgtaggtagaaacaaccaaggtatctttattaacagtataagacttggtgcgtttccctttacggtagagtcggtagttatctacattatccgaaatatagtaatctactagattcttatctgcatttggataaagtttcgagacaactttagtcaactcacgcttaaattctgaaacttctttagtataggtaatcgatttattccactgatcaacaacttgatattccttcaaataatctgaagctgtaaaagtaggctgatcctcctcaccttttttataaaagtaagaatgtgtttgtaaattattagactgatcaactttaaggaaagagacgtaaatttcatctttatcttcatgttctttcagagcattggttaactttccagaattttcgtccaagaccttagacgattttaattcccaagtcccctcaatgttccccgaagcattacgccaaaaaccatatacaccaccgacgagcaacatcaaaacaacagcaacaagacttgaaatcagggctcctttaccccaatttttggccttttgcgatttttgattagcgttttgaatcgtttctagaagacgaacctgactttccaatctcttttctagtttggcaactgtctgttcttccttagatttagctttagcagctaatttttcagcctttttcttatcacgagcagcttgacgagcaatcttcttagctgctttttcttccttatgatcaagttttgtcaaatcttcagacaatccaagatgctgtgcttggttactgaaaactggaatagattgattaggctcactcgaggtattaacagaatgatttcctgcatctggacgggttggcgcataacttgctaaacgctccttagcctctgcaacacgttttcgttgttcctcttctttttgaatatcctcagcctgacggcccgactgaatggttcttacttgaccaacagtctcttgagatagggcctttctcttttcttgggccgcatttgccatagcctcttgcacgttgtcacgctctttctgagactgggctagtgctctggcagttgcggttccttcttcaaactgttggtcagctgatgattctccttgatcagctacttggtgagcctctgcaccttcagagagaacaaactctcctcgttccaaggcttctttaaagtcgattggtcttggttttcggccattcacagcctcaaagtactctaaccattcgtctttcaacataataaatccccctgaattaaaaaacacatgattaacttccctattttaccatactttttaacataaaaatagggattaacaagaattctaaaaattcttattaaatccccattaatcttcttttggtgtaatagacaataattggacaaaacggtgttgtgctgattccgtttcaagcgtgacattatcatatctaaagagaatctcttcgatatttgccaagcccaatcctcgacctgttccttttgttgaaaatcctctttgtttcaaaggagccacatcaatagaagcttccttagttgaattctcaacaacaataacagattgattttccatcttaaagatagcgatagataattttggttcatctgctaatacagtagcttctatagcattatcacaaagaatggatatgattgtaatcaagtcgagtggacgcatatctgtgaagaagacgccctcttcaacctcaacatgacattgaatacctttatcaaaagcttcggctactttagatgacaacagactcttaagcggcatgttggtcacacgagttaattttgccaaatcaaacttttgctgcttcaaatctgatgccgaatctttcaagacactatcataaatcatcttgatttggtcgatgtctttcatctgaatggcttcattaagcgaaatcataacattagtatagtcgtgacggaaactgcgtaacgtttcgtaaagactttcgacttgttcagaatacttctctaggtcatccaagtgacgacgattttcttttcttcgctcattttcaaagtactcatctgcgtatctattgacactgtaaacagcataaagaatcgctatatagccaatcaaggttataatatggccagcatagtacaaatcaaagaaacgcgaagccacaactacggaatagttcataatcacataactaatcaaaacaaagttagtgaaaaacattatccgaccaaatttgcgatctcgctccaaaaccctcaaatatttaaaatcaatattaagaagtttggaaagagcgacaaatgttggaataattaaaaggtcaaagaaaatgaaataaagataacttttgttaaggaaatccgatgtgataccaaatcccggcatcaaaaagtaggcataaccattaaaaatcaaaagataaagaacaagaggatagaaagcataaaatgccaacatattggtggttctttccttgccatagaaataagcatagaaaagaaggtagaacggtgtcataaaggacaaaccgacattatatgacatccccagtatcccccctatacattcaactaagaacgcaataggaagaatcatacgtggtatcttgaccaagctggtcttttcgtaaatccactgtatgacgatgaaatgcaaaagatattctaatgcaatttgcaaattgagcatcatttaatggttagccacctccttctagtaatcttaaataagcagtaaaaagccacattactattttatcacacttcctgctattatatgagataaaattaaataattatctcgaatttcagaaaactttcaataatgattagagaagaaggggaaaatctgagccttaacgatttttcaatcgttccaaaagttcctttttacgtgtccgcgagaggaggcatgactcgtctccctcaaagaagaccatattagccgtacgatccacacttgtcacattactcacattgacaacaaaagagcgatgcgtttggaagaaaatatcatccaatttcgctacttctgcaatttttccatagaattctactagatttgacttggtgtgagcgatcaacttatgtggcacaggggctgtttcaatatataaaatgtcatcataaggaatattaacatcatttttatccgtttttaccgttagactctgtgccttggtttcttgttcaacctgcgaatacgcaaaatctaaaagttctaccaaggctctcttaagatctgcatcttccatggatttatcaacaaagtccagagcttgaatcttataacggaaggtcaagggcataaactcagagtaggctgtaacaaaagcgatttgtgctttcaagtcttccttacggatttcaagcccaatatctagtccctgcttcgtttgatttttaaggtcaatatccaaaagataaaccatggatttacccgaacctctatcagcatctaacaattcctgaccttgctcataaaaggtaatcccatcaacaacggccttcgactcctcaactgcttcgtccaataaacagctaacacgatgacgctgcaaggcatcatcttcaaggacgataatagaaagcatcttatttccctctttctttctaatatactttaatatacctatttaacattttatcataattaatcggagaatattcctttttttacagcataaagtctttttaacttacctcatttcatttataaaacaattgttatcttcctgtcactttatcttcatttttagatgttatcatgagagctgtttttgttttatattaaaaaggagaaagttatgttacgttcttttaaaacacaagggactaagacaaagaccatcttaacccttgcaactgtcggtatcattagtgcttttcttgtgggaaatcctcagcatgcctctgcggatcaaacctatgtttcagatcctaaccaggctatgacattttctgaacttgaaacagctacaaataccaataccattgctcaaacaggtgtatctagtgaaacacctactactgtgactactgtgtcacatacctctgtggatgatattcatacacatgaaaatgactatgaacaaacgcccacaaatactccgacttttgaggaattgaaacaagatagtcaaacagctagcagtactgtcgacagccagactggtagcaaaacctatgagactagaattccgacaaatacagatagcaatcataaggctgtagaaaatcactctgaaccaaagaccgaaactgtcgctcaagcacaaacctggtcaaaagatggtgctacatgggtatcaacagaaattaataatagtaacgttcataagattctatctacttatattccaaaaccattaacaccttctacaaagcccacgacaacagctacaccaaaacctaaacaatcaactcctgctgttagtcaacctaaaaaaccagccacagtcgctaacaaacctacaacacaacctaagaaaccaacggctgttgtaaacaaaccagcgccttctacaacgacacaacctaaaaagccaacaacgactgtcactaaacctacagctcctaaagctactcctatccaacctgctaagccagtggaccgagttgctcaagtatggcaaaagaataacgaactggtaaaagagaattacgacactcctcactggtcaagtaaggaagcaacagtcttcatcaatgctaaaaatcctgaaatcgtgaatgcctacaaacaagctatcacttcttggaataacactggtgcctttaatttcttgctcactaacgataaacaaaaagctaacatcattgctgatgaacgttatgaaggtaatgtagcagctcctcttggggttacctactctacttactacctcccaactaagcaatatagtaatgctacggtttacttgaacaccttccatgttcaaaacaattattatcaaaagaatggtggaaaactccttaacactgcgcaacacgaattaggccactcaattggacttgagcacaacagtgctgttgcctctgtaatggaacctaaaggtggtaagacaagtatccaaccagttgatattaacaatgttaagaagctctatagcaagatttaagttcttacaccatcactataatttataagcagacctatcaggttctgcttttttgatacaagtgagatgaccattcaagaccagaaaatgactgttcatgattttttcttacatattttaaaaatatgtaaagttttctccattttttttggtaaaatagaaaatgtaaagagagaccggatgagttagaaaactcaactttgttagtttttgctcattattctcataaacagaataaaaatagtctaggaacccttcttaacatttatacctatcttccccaaacacttttcccccattcctagatttccagatctctcctaataaagaacgtctagcaacagcagctaggcgttttttattgtatctaaagcacataggccttgatattaacctagtagattagtaatcgttcaaaataattctcacaaaattaccattcaagatcagaaaatgactgttcatgattttttcttacatattttaaaaatatgtaagttttctctgattttttttggtacaatagataatgtaaagagagacctaatgagttatagataaatgttttatcatttaaaacttattgttctcacaaatattttctaaatagtctaggaacccttcttaacatttatacctatcttccccaaacacttttccccattcctagattatcagatctctcacaagaaaagcgtctagctcacccggctaggccttttttctttttccatacttttgctataatagagccataccgtttgaaaggaactcataaaatgactataaatcagcaacttctttgctacaaacgtttaccaaactggacagctacaacacttccggaaatggtgacgcaaaaacacaatactaaggtgggaacttgggctaaattgaccattctatcgggatctcttcacttctacgaattaggcgaagagggagaggttactgcagagcatctctttacccccgagacagagattccttttgttgaaccacaagcttggcatcgcatcgctgctgcttcagatgatttggaatgctatctttctttttactgtaaacccgaagactacatggctaaaaagtatgatactaaggcccactccgaggttcttgaagcagtccaatctggccatatcaaacctggtcgtacccttgacctaggctgtggtcacggtcgtaacgctctttatttggcatctcttgggcatgatgttacagccgttgatgttaataacgaagctacacaacgcatccaaatgattgcagatgaggaaaattacaatgttagagctggctactacgatatcaatgctgctgctcttcctgagtctgaaacctttgatttcatcctctcaacagtagtctttatgttccttgatccggatcaaattccggctattatcaagaatatgcaagagcgtactgtcgtaggtggttacaatctgattgtttgtgccatggatactgaggaacacccttgtaccatgcctttcccatttacgtttgaagagggagagttgaaaaattattatagtgactgggagttagtcaagtataatgaaaatcttggtcaccttcaccgtttggatgaatatggcaatcccatcgcccttcaatttgcaaccatgttagctaagaaggttaaataagagcgaatgactgtagaagagctgaacacagcttgacttgtcttcaaagtaaaaactaggaacccagtcggattcctagttttttaattgtttacaatgtctgcatatcctgatttaaggtctgcattttctgtttctttgacataatagacaccaccattggtagttggtgaataaagcacaaagggagtcccatcttttttaatggtgaagaaataacggtgaacagatacattttcccatctctcgtaaacggaaacaatggtatactcagaactgctattaccatttgcagcataagtagcatccacagtctggttatggtccgacatccaacggataggcaaggaagaggcttcattggtaatttctttgtatccaggctgattcatctgattgccccaagaaaccatcaaactagcaagttgactagctttgtcattggtccaacgtggattttcagtataggcttccttagcatggttagcatcaggtgtgtcaatacttgcactgctagattcacttgtcttcgtattttcggccgatgaagtacttggcttggcactagccttatctgtcgatgagaatatcgagctagccactgtggcagatgacttagtctgtttgacgttcttcagtgaactagagactagagtcaagccaatgccaactactattgctactagagcccccagaagaatatagatatagttataatttttcgagattccaataaggccagactgataagctaattgtagttcatctggtttcggcttccgcccttgaacttgctcaaaacgacttatccattctgcttctgacagctttcgcataattttcctcttctctttatcaattatcttccatcctatcatagaacagtgatgatgacaatagtagagagaacttgaggtttaccttcaacctattatcctttattttcaaaataacgacgaacaatcggcgtcacttcttcaccataaagtttaatagcctttagaacatcttcatgtggcatagaaccaattgggagatgaagcatgaagcgatctagctgtaaatcctcaataatacgaatgattttttgagcaacgtgagcagggtccccaacgaacatggctccgtttggtccaacactagcatagtactgctctttagtcatttcagaccagtgtgggcgatccttagcaatgttatccactgtttgttttgttggataaaaataattctctatcgcttggaaattattttcttcaatccaaccccaagaatgagcagccaccttaagttgttcatccgaataaccatttcgagcacctatctccttataaacctcaactaattttgcaaaggcctttggatttcctccaattgtagcataggcaattggcagacctttttccgcaatttgaatggtcgactcaatgtgaccacctgtcgctacccatattggaaaatcatcttggactgctcgcggatacacaggacgattgtcaacagattgagtatgcttaccttgccaagttaaattcgtttgttttttcacttccagaagcatatctagtttttcattgaaaagttcatcatagtctgaaagatcatagccaaaaagtggaaaactctcaacaaaagaacctctacccgccatgatttctgcacggccatttgacagagcatcaatggttgcatactgctgatagacacgaaccgggtcaatagacgacaaaatggttactgcactagataaacgaattttcttggtattcacagcacctgctgcaagaacaatttccggtgccgataccgcaaagtcttcacggtgatgctctccaatcgcataaatgtctagtccaacttgatccgccaattcaatctcttcaacgagttctcgaatacgttggtcatgagagatagcttttccagtcgattctaggagggttgtttctccaaaagttgaaatgccaagttcaatcgtcataaatctttcctccagtaattcttttatttgttatgagaacaacattatcactagttagtgataattacaaataaaaaagcctaagactctattttccaagaaaggctaatagggttaggcagaaaagaagaactaaagcacccatgaccactaggagactaagcttataacccagaggattttgaggatttaaactagttccaagaccactcctacgaaggacaaataagggttctgaggaagattgattaagggtgtaatgcaagagataccttaagcaaaatagaaagtagagactcatccctggaaaaatggcaaggggaagaatcattccctgtgaccaccaaatcatgattgtaagaatgatttgtatcaataagagagcccaaaacaagtaataaatgtaggattgctttttcattaatatgtacctctcaatctaagataagtatactcctcctagcgtcccttatcaagcccataactcgcctgacaccttattttctgctacaatagataagaataattcaaagaaggaaactgtacacatgaaattaatttcttggaatattgattccctaaatgccgcccttactagtgattctgcacgcgctcaattatcacgcgctgttatcgacaccttggtcgctgaaaatgcagacatcattgctattcaagagacaaaactgtctgctaaaggtccgactaaaaagcatttgcaaatcttggaagactatttccctgactatgacaatacttggcgttcatctgtcgaacctgcccgtaaaggttatgctggaaccatgttcttgtataaaaaagaattgaatccagtcattacctatcctgaaatcggagcaccttcaaccatggactgtgaaggacgtatcatcactcttgaatttgacaatttctttgtgacacaggtctacacaccaaatgctggtgatggcctcaaacgtctgcttgaacgtcaaatctgggacgaaaaatatgcggattacctagctgaattggatgctcagaaaccagttcttgcgactggtgactacaatgttgcccacaaggaaatcgacttggctaatccttcaagtaatcgtcgttcaccaggatttacagatgaagaacgtgctggtttcactaacctccttgcaaaaggtttcaccgatacctaccgtcacctcaatggcgacgttacaggagcctacacatggtgggcccaacgtagtaaaacatctaaaatcaacaatacaggctggagaatcgactactggttgacttcaaatcgtattgccgataaggtcacaaaatcagacatgattgactctggtgatcgccaagaccacacacctattgtcttagagattgacttataaaataactctagacctaaatcacaaaaagagtagaactgctactcttttactatgcccaattaaggagaaattatgaaaaccaaacttaataccactcaaaagctcgttctgtcagctattatgatggctctttacatcgctatcctctttttatctcaagccatttcatttggtgcggttcaaatgcgtctggccaccgctttatatggattaacctacatcttcccgtttttggtattcccaattagtctggctaatgccatcgcaaactcttttggaggtttgggattgattgacgtggttggtggtttctgtgctagctttttaacaactggtagcatctacctcatccgtaaagctaagttatctagctggttcatcattcttccaattctactcgttcctgctttagtggtaccaatctggcttagtgccttgctcaaacttccttattttgctctcgttattaatcttctcctgggacaattagttcctgcgattttgggagctgtccttgtacgagaattggctaaacgaggatataaagactgacaaacaaaaatatctctgcacattgcagagatattttttagtaatcaaaagcttttttgtaagcttctcttggtgtcaatttgtcaccagagataagcaaacggtagtcaacattagtaggatctttttgatactcatcaacccaatcttgattcatttcgaggtaaagattataagttcccaactcagttgaaacagtacctaccttgtaaaaatctttataacgcttttggttatctgtttttttcaatttttcatatcgataataagttctggcaaagtcagtgaactggtattctttcttatcttttccagagccaattgtgacctcaatggtgcccttattatttgttaaatgtaaatcataatcataatcattgtgactattcacttggaagacacctgaagtgatgtcactatcatcagataatgtttgaatatcagcgaacttcgcagcctgccaagaagcagggactccttcatattcaccatcactctgtagacctagaagtgaccaataatgaccgagatagaaggtattagacttctcacgatctgtcaccagttcacccaccatcttaaggttttcagcacccagacggtatgggttagaaaggtaaccaaagactgggaagaaataaatgatgactgtaaaggtcaagagggtcttcatattaatcttgttaatagcccagaagaaataagcagctgagaacaagagagcgtaagcagcaccgtagctgaacttatgcgcatgggcaatcaaaagtaaaatgaagaaaataggttggatcggacggaccttgtgatagatgatagagaaaacatcctccttgtcttcctcagatttgaaaatcaaggacaagacaatggtcaagagtacaaagaaggcgccaaaaccgaaaccaacatcatttggacggaagaaataagccaagatggacatatccatcaccaaaagccagacagatgcaaatttgatcatattgttaccaaattttgcagccgtttgactaggtgcctttaaaggtacctcgaaggcttgtgcaagtgctctttctttggcttggcgttcagcctctattgccgctttcatttccttagtacggcgttccttttggaacaaatgagcaaccttggtcggttcatcttcccttgacttggtaatactcaaaaagagtaaatattgcatggcaaagatgagagctgtgttcccaccgtattctaggaaggaaccattccaaatactagaaacaactgtaaaaacgatataacctccaattgagattaaaaccgtcaagagcaaatgaatccaacgatagcggtaagtgtatttatcagttgtatctcgcctcaaaaacgtgtcacgtgggtaaagataccagataacgaagataagttcaatggcttgaactgctgttagaaaaccaacgtagttgaagccaaaaacggctgctaccacattgatgagataggaaataatggccaaaactcgcagactggtgcgcttagacaaaagtccaatactcatcagggtgatagttgagaaggcagaaaaaccagcgcccatcttattatcaaagataaacacattgacaaaagcaaaaatcaagattcctaaaagacttaagacttgtttttgcatttcttttttcttttctttcatattttccctccttatggaaatgataacgtttccgtactcctattttaacacaattgtactatttttgtcagatttaaaaaggcattcggataaccgaaggcctttttcatttgttatctattgcttcaatcttgaggaacacaaaatccccatcaaagcgttgaatatacttttgaaaacctaataaactaaaagtttcaatctcatagcggacctgatcaataccatcactagtgctttcctcaagcaattttagttttggaatatcggattccaagacatcacggtaaagtcctttatactcaaaggtaattcgagcccactcgttaccagaaagcattgagaaagcctgataacgcacctgctcatctgtaataagacagtctttttgttctggactgagcgtgaaagccaaatcattttcggatttatgaatggtctggaaacgatccacacggaaataacggatttcagagaactgataatcacaagtaaagttatcatccagtttgtaagaaatacagtagaaataatggttgtcaaaaatgactgaaattggaaagaccttatattcctccactttttctcctggcttacggtaactaaatgacaatggacgttggtccacaatggcatcgaaaatggctgaaatagctggtaagagtgacttatcttgttcctgataaatcttaagttcttgataactatccagttctagctcagtcaatcgcttgatacgtctgcgctccttgtcgtctacagccctctcaacaaagatgttgattatctctgctacttcatcctttcgaagagctcgactctctaaaagaatcttagataggataactgcctgattgtatttaaggttaccatagccttgttcatactgggcatggtaggaaccgtattttctggaatacttaaccttcatatttggccggagttcagtcaaattctccttgagctcactcacatcctctttaagcgtacgctcacttatgccaaagcgagcgaggtaatccgtttttgaaatgtcatttcccttttccaattcggacataaagtacaagagacgtttggtttttgatgctgtcattataaaatccccctttataatcaaacctcttattactaaaaaattgctgtctagttattcattatcatagatgatccattaccaatggcgacgagccacagaattatagctcaaataatagtcctttttcttttcgttgtactcaaaagagagtcttaacaattgtgctttctcaataggactattctgatcagtgtaattaagatcaactgacttatgcatgattcctgatgaatggacctttatacttctccaggccccttttgcctgaggatgttccctcactacctcagacaaggatgttattggtccaagataagcttggtctttggtacgtaagctatttatctgctcttcagtccaattactgctatagttatcaacttcagtgacgccatcaagtggataagtcgctgttccaccatcataaacaaagcgtctcttttcgtccttcacaaaagagagatcaatatactcattgccatctccacggtcatatctcaccttgagaccactggattccatctcgacataattgcccttaccatgactttcaataatccaacgtaaagtatcagccttaggtttcatattttcaaaatcttcttccgtccagttataaatcgcagacttatcttcgtagtcttttggatcatcactatcgggtttctcctcatcaagttctgactgggatacttgttggatcagcctgtattttttcatagcgcctcgatagacagaaccacctaaagttgcaaagaaggataatccaatcagggcaagcacgattgcggcaaagagaaatctacctagcttctgtcccattctaaagagaatgatagcaaggacaaaacaagccacaattacagctagatacagtattatcggcttatacctccaagataagaagaccgacatccagctcacacttaagagtatcaatggcaaaacaaaggtcaaaaagaaatgtcgcttttcagctttttcctcctgaaaagcagattcaaactctggcccttgattactaaaagccgactcgaaaacctgatcaccattctttcgatgatcatcacttaaataacgtttactttctttattaaacatctactcctctaaatattctatataacaatttcccagttttatctattgtaacaaatgaaagcgtcattttctacagatatacttaaaaagcaacctgtcttaggttgcttaaaggtttaacattagtcattctcgattttttcagcttctgtactgaatttttgtgcgatggcttcgagggccaattcgtctgtatctggaagagtgatggcatcatctgaaatctcatcaatattagcatagaattcaatgtgatttttaaggttttgaagctggataggtgcatcaccaccgtattcaccatctaggttaatcatcatacgatctttcccctgaggctcaatatacagcgaactcgttttgatataggaaattctcttgtcgtagatgtgtttaccaccttggagaacctgacgaataaggtctaccaattcaaagaggtttgctgtcttaaccatgattagtgtaaatttaccatcatccagtttagcatctggggcaatcgtttcaaagccaccaactgaattggtcaaggcaacgaaaatcatggaaaggccaccttcaaagacaccctcatcatgcgtaatgcggacaggaaccttcttaacttgtggcaacaactctgcccccttaacaaggtaggccaaataaccaaggactgtctttaagcgactaggcacactataagttagttccgtaaaggaacccgcagctgcaatattgatgaagtatttatcagcataggcacgaccaatatccatttgaagggtttgatttttagcaataaccttggctgcttcaacaggatttcctcttggaatctttaaagcgcgtgcaaagtcatttgttgtccccgttggaataaccgccatttgtgggcgatttttgagtggggcaatcccagaaacaacctcattgattgttccatcgccacctgcagcaatgactaagtcaaagcctgctttagccgcacgagtggcctcattttttgctgagttctcatctggtgttgtttgaaaggctgacgcttcaaagccagcaccttccagaatatccaagacctcggcaacattttttttcataatttcttgtccagatgttggattataaattaagcgggcacgtttttgtttcatattgaactcctataaatccagcaaccaagcctcatcttttacgtcaattcctaggctttgtgctttttccaacttacttccggcatcactaccagcaactactaaatctgttttcttagagacagaacctgtcaccttagcacccagagcttcaagttttgcctttgcttcactacgtttaagacgctccaattttcctgtcaaaacaactgtcttaccagataggatggcatcatctgctaccttttgcccaaggtaggacaaattaaccccataagtctccagttctttcatgagaacttgagcttcttccttggcaaaatagcgctggatggatttggcaataacctctcctaaaccatctacagcagcaattgcctcgacatctgcacttgctaactcttgtatacttccaaatgcttctagcaactgcttactaactttggcaccgacatgacgaatacccaaaccatagagcaatttctctgcagaattatcttttgaggcttgaatggatgcataaagtttttcagcagacttttccttgaaaccttccaattggaggaaatcttgactgttcaagccatagatatcagctacatctttaaccaattcagctttaaagagcttttcaaccactgaaggtcccatacctgcgatgttcatggcatcacgagaggcaaaatggatgaggccttccttaatctgagcaggacaagaaggattaatacaacgtagggcaacttcatcttcaaaatgtaagaggccactaccacaagatggacattgcgtcggtacttccatcggttcttgcgttgtacgcttactttctactactcgaagtactgcagggataatatcaccagctttgtagacaataacggtatccccgatacgaatgtctttttcagcaatataatccacattatgaagggtagcacgactaaccgttgtccctgctaattgcactggagttaaattagcagtcggcgttactacacccgtacgacctacctgccagtccactgagagaagttctgcttccttttcctcagcagggaatttataagcaatggcccaacgtggtgccttaactgtaaaacctagctcttcttgcatagccaaactattgactttgataacaacaccatcaatatcataagccaagtcatcgcgatcctgtccaacagcttgaataaagtcccaaatctcatccatcgatgatgtgacaatacgtcgtggattaacagagaaacctagttctgccacttcattcaggacatcattttgtgtaagacgctccgttggactcgcttcctgataaaggaaagtcgccaaacgacgctcggcaaccaccttggtatccaactgacgaagggttcccgctgcagcattacgtggattggcaaattcggcttcaccattctcctgacgctggatattgatgcgttcaaactcagcccgtggcaggtaacactctccacgaacggtaatattaagcggttggtccaacttgagaggaatgtcagagatacgcttgacattttcagtgatattttcaccgacagaaccatcaccacgtgtcgcacctacctggagaacaccatccacataggttagcgagatagagagaccatcaattttgagttcagccatataatcagcattaggaaattcagccttcactctctgatcaaaggcatctagttcttctcgtgaaaaagcatcctgcaaactataaagcggatactcatgttgatatttttcaaaaccatcaaggaccagacctcccacacgatgcgtaggactatctgcttgaacatattcagggtactcagcctccaaagctacaagctcacgatagagcttatcgtagtccgcgtctgacaccgatggattatcttccgtataatactcttttgcatactggttaagtttagcaaccagctctttcattcgtttttccataggaacattttaacataaaagcagaaaaaaacgcctttacagacgttaatttaggaaacaaaatcaatgactttggccaatttcttaataagaattgcaccaaccaagagtgatgccaattctcccatagcaacagtgaaccaagttgcccaaaatggtgcttgagtaactagagtcaactcagccgcaatcgtcaccatgaagaatgaaaagtaaaaggcaaagaaaacatgagccttgtcaaaaaggccacccaaaatgtcttggtttttaaaacggtcaaagaaataaacacctgaaccgacaaagaccaatgttgataggcttccaacaaccacatcaatcatgttaaagctaaagaaattagcaatcacacagcccaaagtaacggcaatgatatacttgcgattataaaatcctaaaagattgaacatttctgcaattcggaactggtagggaccgtaggaaattaagttaaaaggtggcacaacagtcaagactacataaagggccgccacaatagcaatatgtgttaaatcacgaacagtttgttttttcatttttcctccataatcaatgttttttattagctacgaaaaatcaataatcccgtcaaaagagcctggatctcaccaagctctttttatcatctaggaatcatcctcatcttttttatgttttttgctgtcactaccatctccagaaaagctctgaataatagtaatcacatctcctcttctactttttagttcaccttgtctaagttcttgataggtcgcattaaagacggcacccaaaatcaaaatcctggccaaaaagatgaaccaaagcatgaagacgaaaatcataatggatccaaataacttgatgtcaaccaatcgactcaaggtacgaatcacgtaggttccaaacaagttacttaaatagccaatcactaaagtcgtaaatattgttcctggcataacatagcggatttttcgaatcttcacatttggaagcacgaaataaagcaccatcattcccaggaagacaactgcaatacttagaggctgaatactatttaaaataagctgggtcatcttggaaccaataggataggtctgattgataactcgaaggaccgactgaataattgtggacagcattagtgcaaaggtgagcaggaataagattaccagactcatgaaaccaccgataatgtgactaataaagacatcacggtgttctgaagcaccatataccttgttaatcgccttttgaagtgaagacaaggacttaatcatagtccagaatcccgtcaaagaggcaactcctagcaactgtccagaaggtgtcgagaagatatcctgaacaacgttggctgcaggtgcataaaactgcttaggaaggtgctcattcataaacttcaagagatctgtcgtatcaatattcaaatagggaaagacattggccgcaatgacaatgagcggaaaaatcgtcaaaatgagatagtaagccactgcgatagttgaaatgtctatctctgcactacgataatgcctaagataaacctgcaaagggcgccactggagtttatccaagagacgggccattaagccttgtcgtttcatattagtaagttctttcttcgccttgagaagtcaaaattactggaccatccttagtaataacaaattggtgttcatattgacaagaaagtccaccgtcaagagttttgtgagcccaacccgtttcaaggtccgtatcaatttcccaagtaccagtgttaatcattggctcgatagtcaaaaccattccttctttgagacggagacctcgtccagccaccccatagtttggcaccattggttcttcgtgcattgttggcccaactccgtgtccaaccaaatcacgaacaacaccgtaaccacgactttcagcgtattcttggatagctgccccgatatcaccgatacggttaccgacaaccgcttgttcaataccaaggtacatagcctcacgtgttacttccataagttttttcacttcgtcagatggcgttccaatcgcataagcccaacatgagtcagccaaaccgccagaatatgattccgtgtattttttaacctgagcaacattgtcaaagttcaattttgacacatcaaggactgacttatcgataggttctgacaagaccatatcaactttcaagaggtcaccatctttcaaaatatagtgacgtggaaaggcatgtgccacttcgtcattaaggccacagcatgttgcataagggtaatccataatgcttccctcaactccaatctgaaggggaagaacattttcttctttacaacgacgacgtacatactcttctacttcccacatatccactcctggtttcaagaggtcacgtagaccaatgtgaatgctagcaagaaaatcccctgccctatccattgcttcaatttcacgtgctgattttaatgtaatcattattttctccgttttctttatatcttttatttttttattcgttactaagttttcttaaccacaacaactgatttgcagacggtatgattcccgtgagtaaccataaggtccagatgagctctacgtctggtctcagcgataatacttggtgtaatcgtcaccttgtcatcaatctgagccgcctgaagaaagtaaaacatcatttcttcaatcacaagaccattttgctcctgcttttccatgatacgatagacaacctctttaaccatctctgcaagaacaccctgagtgaggtttccagaattgtcaatcatagtgggctctacctcaaagctgaaagcatgcttgtcctggtttaggttagctatcatttgatcactaaaggtgtgcaagttgccacgattattgtcctgaagttcttccaaaacctgacgacgggtgataacacctagatagtgtttttcttcatccacaacaggaatgatatcaaagtcttcaaaaatcatcttttgggcaacagttgccagactagtctcaagtcgtgtcaccgtcggcttggtcatgattgccttaagcatggtcgttggttgctgattagacacatcccgcatggtcacaataccaatcactttttcagactcagatagaattggaaaacgtaccaagttggtccgtttaaccaaattctgaaaatctctgaccgtcatttctggagtcatgtaattgtagtcttctcgtctggtatagacttgagctacagtcttgatatctgttttgatacggacattcgaaagcgcctggttaatcatggttgccacggtaaaggtatcgtaagttgttaccataactggaaattgcttcaaacgagaaagctcttttaccctatcggaaacctgaaagccccccgtcactagaatagcattattgtgttctagagcaagcaattgaatatcctcacggtccccaacaataagaagatctcccttggttagataacgggtgatattctcaatagtcatggctccaatatagaacttactgaagacacgttccagaccttcatgaccagagataacctcagactctgtaatctctgcaatctccgcaaaggtcagcctgtcaaggcgaacttggactttcttttcaattcgaaccgttccactccgaggacgggtctcaaccagccctcgattttcagcttctttaatcgctcggtaagcagtcccatcagaaacctgcaagtggttagaaatactacgcacactaacacgcttaccaataggcaaagcctctagataatccagaatttcttggtgtttactcacagttctcctccttctcaaagcggagataatcacgcatggtacgggtgtagcggtctgctcctttaaagcgagatacaagtttaaagccagacttttctgctacacgaatagatgccttattttccaaatgggcaataagaataatacggtccattcccatagctgtcaaagccaaatctgacagacaggtaaccgcctcagtcattagacctctcccccagtaagaggcattcagaaaatagccaagctctgcagtccgtttctggacatcaatcttttcaaaacgaacgacgccaatcatcttatctaactctttatctacaatcgcccatacacctagaggctccttcatgaaataatgaaccaaaaggcaatccgtttcatgctgtgtttgagtggcaggaaagaaaaattgtagattctgaggatttgatacaatttcgtgtaaatcaaaacgatccaaaaagatgagtggtctaaaagaaaggcgctccgactcaaaaaaggcaaaagcacccagactagtccaaatatccatgatagtattataacacagttttagaaatggaaaaaggctcaaccactaggggttgaaccttagacttaatcttcaatcaaacgaatatctgcaccaaggtcagaaagtttctcaatgatatttgaatacccgcgaaggataaactcaatattggtaatttcagtttgaccttctgccataagacccgctgtaacaagtgccgcacctgcacgcaaatcactagcttttactggtgcacctgaaagttgcgttggaccactgtaaataatttgtccaccgagtacttgaatatcagcccccatacgagccaattcaggaacgtggttcacacgtttttcataaattgtatctatgatttttccgcgaccacttgctttcaataacaatggcgtcataggttgttgtaaatccgttgcaaaacctggataaggcgatgtcttaatgtcaacaggttttagatcaccttgctcttccacaaagatggcatcttcttcaacggtcatacgaacacccattgcttcaagtttagcaataaaactttcaaggtgttcataaagaacatttttaaccttaattcccttaccgatagccgcagccatagcaatgtaagaacccgcttcaatacggtctggaatgacctggtgacgagtgccatgtaagctttctacaccgtcaatggtaatgacttctgtaccagcgccacgtacacgcgcacccatattgttaagaagagttgctacatcaataatctcaggttcacgcgccgcattttcaataaccgtacgaccgtcagccttaaccgcggccaacatggtattgatggtcgctccaacactgaccgtatccatgtagatatgagcaccctgaatgcgttgaccagcatcagtcgcaatacgcatagactcggcttcataagaaatgctggcacccatcgcttcaaacgccttaaggtgaaggtcaataggacgtggtcccaaatcacatccaccaggcaaacctactgttgcttgaccgtaacgtccaagcaagctaccgtagaaatagtaagaagcacgaaggctgttaatcttaccaaatggcattggcatatccttaacgcctcgtgggtcgatttcaagtgtttcgccatcacgcttaacagaaccacccattacttctataatttcaatgaggttatcgacgtcgctgattgctggcaccccatcaagagtaaccactccatcagataaaatgatggccggaatcaatgcaacaactgaatttttagcccctgatactgtaacttctccctgaagtttcttaccaccattgatgataattttacgcatactgttcaatctttcttatactggaatattagccattacattctaccatagattgaggtgcatgacaaattaagaactctaacaattatcggacagtttcacttgaccacttaaaccaccccttaaaacggatagcaccgttctggtctgttcgtaaaaccttaatgtgacgttccttgaaacgctccaaagtttcatcatttggatgtttataacgattattctcaccagctgaaacaagggcaagggagggctgcaactggtccaaaaacgcttcagacgatgacccttttgaaccgtggtgtccggctttgaggacactagcctttaaattaggatagctgaccatcagttcctcctctccttctttttctagatcacccgtaaacaaaaaactacttcctaatagttttccgtaaagaactatcgaatcgttgttaccaccatcaccaactttatttggataaagaacctgtagcttacttcccatcatgggtaagttgtctccagcctttagagtgcgaactgggcgttttaaagttcgaagtcgtttcacaaaactaggcttagtcaaagctccttgactgacacagatttccttaatcttaaaccgcttggctacttcttccaaatcaccaatatggtctgtatccgtatgagtcaggaccagatggtcaatttgagacactcccctagcctgtaggtagggaatcaaggttttctccgcattgctcgtctggctagcctcttgccatttttcctttgacccgaaagtcaccttgccacccacatcaattaggatggtatcgcctttcatactcctcagaaaaatactatctccctgaccaacgtcaaccatagtcacctcattggttaaaggatgtttgacccagaccatcaaaagaccaaaaatcatcaaaaggcaaatcctaaactgaggctttttccaaaaatcaaagagcataaccaagacagctatcatcaagccaaactgaaacaaactaggtttccctaaaatcaaaggctggcctatccaggattgtatccaagtcaaaaaggcctccatccattcaaaaagtgggttgatttgagaaaagattaccagtcctgaaagagcaaagaagactgtcaatacaggcaagagaaagctatcaaatactatcgaaaacatcgccgtcagaattaaactcaccggttgaaaggtcccataatagaaagttagaaaaggcaaaatcccaagactcaacactaagctcgtacagattgactttttaagagatgacatctcctcaaaatcaaacaaacacaacaaaaaggcataggaacaacttaaaacacctcccactgtcaaaagaaaatgaggtaaaaagagaaacaatagaagcaaagttatccccatattatccagttttttaataccaaactccgctaacaaactttgaatcagggaacgtaggactgaagctgtccaacctgtcattaagccataacacaaggaaaaaggcagcaagataataaatagataatctttaggaaggcccaagcgtaggagtccatagcgaaaccatcccagaaaaaatcccacttgcatccccgaaagtgcgaatagatgaataatacctaagcttgtgtaaagctgactttgctcatcaaactccttacccaaatacccaaagagcagacctgtcatatagtgtctcataggattaggaaagtgcgtctggatatgaaccaatgccctcctcctcagttgatggaaaaaagctaggggagatagagatttttgaggcaccacatggtccaagcgttcaatctgagccattcgataaatgccttgactggctagataagactgataattaaacccttgaaaattacgttgaccaattgctagggataactttattttcccttttaataccaacgtttggctagtagtcttaaaaaaatgctgctccttctcagatttgagtcggtaaaagacctgataagtttgtccctttgcctttccaatagctgataattgctcaccattaaccgacagcgtatcagcaaccagagtcacctgattgatttcagtaggagcttgtttatcttgtatggtagctctgtggtgcaagaataaaaagtagaccaaaaagaaactacctacaagtcccaccaactttagggctaccttattcttccaatgatgcttcaaaaaacatcctaaaagaaaagacaaaaccccaatagcataaacatttgtgttaaaaatcgtaaaataaagggcagctattaacagagccaaggaaaaaagattgattggagcttttttaagccacatagagggactctctgattttttctaaagttttatcaccaattcctgagacatttttcaagtcatctacggattgaaaacctccatgactttcacgataggcaatgatatcctcagcacgcttagctccaatcccagaaatagtttgcaactcctctgaagtcgctgtgtttaagttaattttgccatccttagcactagtttgccctcctttgtcagaaacctgaccagttcctgattgaccaagaacagaaaggttttcatccttagttgccacatagacaacctcttcgtccgacaggcttgcagctaagttaacactcttagcatccgcatcctcagtcattcccccagcggctttgatggcatcagttaccctagcgcttgcttttaaggtataaacacccggattagccacagcccccttaacatctactgttacttttgacttatccttttcacttccttcagtctttgactgggaagacgcctcagaaagagactgtgagctttgtttggatgaggaggttgacaaagctgtcacatctgtataagacgtctccgcctccatactgttgcccgcaccacaagtcatccatagaaagaagcaaaaaatcaccatcagtaaagcgatgacactcacaaacagacgattatctttgacataggctataatcttttccttcacgctattctccttaattgatatattttctttcttattcgtaaaaaatttgaaaaatatatcaaaaagtaaaaaaactccatcagatttatgtctgacagagttatttgcttatttctgcgtttctttagcacggtgtttttcagggttccaaacaaagctagctacatatgagaaagccatggtaaaaagcactgcaatgatagctacaagaccgagaggtacacggtaaatatatgtcaatgggtttggttttttgcctgtttgatagctcaaagcttcttcatcgagacgatcaaattcagactggatacgacgagcaacctcttgaatattttcatcattcaaacgcttcaaatctgaaatatcaataggattaccatagttcatatccacacgttcacccgtcaagagccccttgagctcacgaggtccttgatagacaactggcataatcttaaccttggccatcttagcgataaccgcaaccccacccttaacatcagaagaatgacgactaccacttgggaacataatcaaactacgattactcttcttaagcatgttaacagggtacttgatagcttcttggccaggattttcacggtcaattgggaaggcgccacacatgcggatccaccaaccaaagatacggctcttgaagagttctttcttagccatgaaaataaactgcttaggacgagctgaaaaagccatataaacagggtcccaccaagttcggtgcggagcaaccaagatataattttcatccttattcaataatttatcacgattgtggtaatgggcattaccattgataatccaaagaaggaagacaacaagcccacgtaaataagcgtaaaacacgtttttacctctttttctacaagttttttactattataccaaaaaaggagctcttttttcaccgaatttctttgtaaaagtcttgaaaatggtgtggcactttctaatagtttgagctataatgtaactatgaaaaaaagtattgagattatagggaaaaatcgaaaggcacttaatctttgcctcattattgcaaacttggttgttctggctatcctaggctttgtcctattccaacgccataacacgaaatctgaacaagtagccaaggctgaaaagactgaacaagtcgctaatagcacaagctcatcttcagaaaaagctaaagaagatgatgaaacacaactcaagaaaggtagtaaccacagcattgcagcttctgactatgcttacgatgttactgctgtgaataacactattcgaggccagtctcaggatatcgacgacaaggtagtctttttaacatttgacgatgggattgatccaacactgaccccacaagttatgagtattttgaaagaatacggtgttcacgccacattcttccacattggttacaccattacacaagaaaatgcggacatcctcaaacgccaaattacagaaggacatgcgattgccaaccatagcctcagccataactttaatctcctttatccaggacgtgttcctaatcaaagtcagattgtttctgaggttaaccaaaccatggctaatttccaagccatcctaggtaaagacttcaagacaagaatcttccgttatcctggtggtcatatgtcatggcaaggtctagaaagtactgaccaagctctcgccaaggaaggtgtccagtggattgactggaatatgctttgtggtgatgcagaaccagcctctgttcgcccaacaacatctgaaaccatgatggcctacttggatggttcacaaaaatatttccctgagagtcatgttaaggttgtccttatgcacgacactgctggtaaggagctcacagttcagacccttccacaaatcatcgaatacttcaaaggtcaaggctatacctttggtgtcctagagtaatcactcacagcagttcctttgggagctgttttttgttacaataaaagctatgacaaatccaattttaaaagatggagaacgcattgaccaactcttctccacagatgtaaaaatcattcaaaataaggaggtcttcagctattctatcgacagtgtcctcctctcacgattccctaaaattcctaagaagggattaatcgtcgacctctgttcgggaaatggtgccgttggcctctttgctagtacacgcactgaggcaccaattaccttggttgagctacaagaacgcctggctgacatggccaaacgttccgtcactctcaaccaactagaggaccaggtgtccgttgtcaatgacgacctgaaaaatttgcttgaccatgccccacgatctcaagtggaccttattctctgtaaccctccctactttaaggcgacagaaacatccaagaagaatctgtccgagcactacctcttggcccgtcacgaaatcacaaccaatctagaggaaatttgccaggtcgctcgtcatgccctcaaatctaacggacgtattgccatggtgcatcgtcctgaccgctttttggatatcatcgacaccatgcgccagtataatctagcacctaaacgcatccagttcatctatcctaagatgggacgtgaggcaaatatgctcctgattgaggctattaaagacggctcaacagatggcttgaaaatccttccacctctctttgtgcataaggaaaatggagactataccgacgaaatctttgagatttactttggaaaaaaggctgagggtgagtcctagacgatgacagaaaaggataacaaagcctacatgtatgtggttgagtgtgccgatggcaccctctatacaggctataccacagacgtcgaacgccgcctcagaacccataacgcaggcaaaggcgccaagtacaccagagcccgcctaccagttaaactcctctattcagaagccttcgccagcaaaccagaagccctgagcgccgaagcactctttaagaaaaaaagccgagaaaaaaaactagcttatatcaaagaacacacggaaaaataaccgtgtgctttttgatataggaaaacgctctattttcatagagcgttttcattgtttatttatcacccttgttacggataacaaagccgtttttcttttcgcttgaggtacggtgtgggcgtttgttgccacggttttcgaagtcacggctattcttcttagacttacgtttgaagtcacgacggccaccgtctcggtcatcgcggttacggtcgccacggtatccaccacgacggttgttatcgcgaccacggttgccacggccgcctttaccaccaaagccaccacctgatggtttgaatggcaatggtttttcacgggcaatttccacttctggcattgtctctgggtcttgaacggtcaaactcaagatgtaaagcgccaattcttcaggagtgaattcttgagccaatttaaccgcatcacccttgaacttgtcaaagttagaacggatagcttcatccgcaaaatcgcgttcgatcttcttaagagcaactttcttcttagcttggaaggcttcttgagctgttggtggcttaagacctttcatgcgtttcttagtcaagttttcgataattcccaagtaacccatttcgtttggagctacgaaagtaatagattgacctgattggcctgcacgtcctgtacgtccaatacggtgaacgtagctttctggatcttgtggaatatcatagttgtagacgtgagtgacacctgaaatatcaagaccacgcgccgcaacgtctgtcgcaaccaagatatcgatttggtcattcttgaagtcacggataacacgaagacgcttattttgatcaaggtcaccgtggataccctctgcacggaaaccacgaagtttcaaaccacgtgtcaactcatccacacgacgtttggtacgtccaaagacgattgacaattctggttggtcaacgtccataaggcgagtcatggtatcaaacttctcttgttccttcactcggataaagtattggtcaacgttaacattggtcaattctttagccttgattttcacatgctcaggatctttcatgaactgcacaccaatacgtttgatggcatcaggcatagttgctgagaaaagaagggtttgacgttcttctggtactcggctaatgatagcttcaatgtcttcaaggaagcccatgttaagcatttcatccgcttcatccaaaatcaaagtctcgatgttattgagtttaagagccttacgtttgataaggtcaaggagacgacctggtgtccctacaacgatgtgggcacctgaacggagggccttgatttgtttttcaatgctagaaccaccgtagactgagcgaactttaacgcctttgtcacgaccaaaacggaaaagctcttcttgagattgcactgccaactcacgtgttggggcaataacaagagcttggattgtattttcttctgtacgaattttatctagggtcggcaaaccaaaggcagctgttttaccagtaccagtttgggcctgaccgataacatccttaccttcaagagcgagtggaattgtcaactcttggataggtgatggtttttcaaaaccggcagctacaacagctgattggatgtcttctgataggtttaaatctgtaaatttcaaagtattcttctttctatttgaaggcggtgcgaagccaccttatgagacttggttgtgtagtagattaactacctgtatttaatagtcgtttattttaacaactcatctagtctatcatatttagaaataaaaagacagaaaataacgttttaaaaccgccttcaatttgagaagacggtttcactcactaattattatttatggaccaaccaacgcaggtagcgggccaagaccaaacaaagaattacactaccgataatgatgaaaatccaggctggactgacagtcataaacggtaaaggaacattcatcccaaagaaaccggtaatgacagcgagcactcccaagagtacctcaataatagtcaaattactcaagttgttgttcaggttgttgtttaggatattattataagaacctgataaatgctgtaagaccttagaaatgaggtccgtcatggctactaactgtctagcttcaatcatggcatcatcaaactgttctttttcaacctcgttgagacgacgataaatggcgtgccccttgatgtgctccaaaaggaggcggttttgtgtagcggcagccaccaaatagaccatgcctgtttccaaatctgaaaggtcgtaaagattcttacttgtcgtagtctgccttagacgtcgactaacctcatctttttgctgatccaaacgttcaatgacgggatagtaggcatttgaaatcatctcaaggcctgcaaagagcaatttataaatggacaaatcctcatggttatccacatagtcttgcattttgctgatcacataagcattatcctcgttactaatggtcaccaaacgcgtatcttgtacaataaaggtcagaggaatggtttcatagtattccttgtccttctcaagagccagaacattataaataaaggtaattgttccattctcacggttgtagtccatgtgagctcgttcatttttatccaaggcatactctatggtttcctggtcaatatcatacttggtataaaggtaggattgctcagaaataatatctgagtcaatattaatccagtgacgcttataacccagttctttttcaataaacatttttcttcctcattactttagcactgctgctgccaaagcttgttgaatttcaaagacgttattatcactcttaaattgaaggacctctgcgggctccaatgctgatgaaatccaaatcttaagttcagcatctaggtcaaagtgccctgaactttctacagtaaaacgagaaatcgagtgataagggatagacttgtaggaagtcttcttccctgtaacaccttgcttatcgactaaaatcaagcgcttctctgtaaagacaatcaagtcacgaacaaggacataggctaactccacctgttcacctggaattaagatgccctccaattggcgctcaaccttatcattatcttttttagatgcgttgccaagcagtcctgaaaaaagtcccatagttgtttctccttttttattgtaaagataatccttgctttaactataccacaattttaggatttcagacacttgcagaaatgggtttctagtagtacaattaaagagtcacaagaggagcaattgctgagaatggctagcttgattttttcttcaagacctgcctaaactcttaccacctgatcaggttaggacctgcgtagggatgtgtctcaaaatagattgaaatagaggaacttctatgacgtcgttttgatgtggcaaaaaacagccaatcaagacgattggtataggaggtttttttatgtcgaaaacaaatattcgaccaatgattgaggttgccctttttgcaaccattgcttatattctggacttagttactcagcccatgtcactaggcccttggatttccctttcctttaagatggtacctatctttctcctcagttttcgctggggcttaaaagctggtgctatgggcggtcttatctgggggctacttcaagtggtgacaggacaggcagccggtggttggctgaccttgacacaagggtttctggagtactttgtcgcctttagtctgattggtatcagtggtgtggtcaaaccagcccttgataaagccattaaacaaggcaataaagtcaagtctctgatggtgattactgaggggattcttcttggtagcttcgctcgttacctcattcactttatagccggtgtcatcttttggggaagctatgcccctaaaggacaaagcccttatctctattcatttattgtcaatagctcatccttccttggagaaacattggccagcctcatcgttttcttcgccctacaacgattcctaggcaggttactaaatacggaaaaataaaagaaaccataggacagtcttaattgacagtcctatggtttttcttgttttcataacatattacgacacgaaatcagacgaatcgatattattcggctgacgtagttagtgagacggctagctagccacaagatagtggctagcgtcaaaagatgaacgatttaaaatcgtcatcttttgtgccgtattacatcttctcttccaatgttacatctggatatttatccgcaaaccaacggagggcaaagtcattttcaaagagaaatactggttggtcaaagcggtctttagccaagatatttcggcttgatgacatgcgttcatcaaggtcctcaggttggatccaacgcacagtctttttacccattggtgtcataacaacttcagcattgtattcattttccatacgatgtttgaagacttcaaactgaagttgaccaacggcaccaagcatatattcgcctgtttggtagttggtgtagagctggatagctccttcttgcaccaattgttcaattcctttgtggaaggacttctgtttcatgacgtttttagcagaaactttcatgaacaactctggcgtaaaggttggtagtggctcaaattcaaatttgtttttacctacagtaagggtatcaccaacctggtaagttcctgtatcgtaaaccccgataatatctccagccacggcattttcgacattttcacgagattcggccatgaactgagtgacgttagagagcttagctcctttaccagtacgggttaggttaacactcataccacgctcgaattcaccagacacgatacgaacaaaggcaatacggtcacggtgacgtgggtccatgttggcttggattttgaaaacaaaaccagagaaatccttgttaagaggatcaatctcatcaccatcaactgtcttgtggccatgtggttctggcgcaaatttaaggaaggtatcgaggaaggtttgaaccccaaagttagtaagggcagaaccgaagaagaccggtgtcagttcaccagctaaaatcgcttcctcagagaattcattacccgcttctgtcaagagttcaatatcttctttagcttgctcatagaatgggttgttggcaaaaagagtatcaccatcttcaatcttggcaaagcgctcgtcacctttatagagctccaagcgttcattatagaggtcataaagtccttcgaaggctttacccataccgataggccagttcattgggtagctagcaataccaagcacttcttccaactcttccaagaggtcaagtggctcacgtccatcacggtccaatttattcatgaaggtgaagacaggaatcccacggtgtttgacaacttcgaaaagttttttggtttgggcctcaatacctttggctgagtcaacgaccatgacggcagcgtcaaccgccataagggtacggtaggtatcttctgagaagtcctcgtgccctggggtatctaggatattgacacgtttgccggcatagtcaaactgcatcacagatgaggttactgagataccacgttgtttctcaatatccatccagtctgatttagcaaagtttccagttttcttaccttttacagtaccagcttcacggatttcacccccaaagtaaagcaattgttcagtgattgttgttttaccagcatcggggtgagagatgatggcaaaagtacggcgttttttgatttcgtcttggatactcatagttttctttcttctttgaaaataatctttttgttacttttccttagtggtatggatgtcagcagcttctttgtaaatctcagaaactccatgtcccagagctactaatagcaataggttttttaccagaacgaaaagcaagatcgttgtagcacttctttcagaaaatttctgtcttttgaaagctacatttgttgtcgaggcttgcgataattctcgcaggcacagctcctttattatatccaaattacagtgtgaaagcaattctgaaagcgttttgtgttagaataaaacaaataaatgaaaaaacacgctatcaactttctgatagcgtgtttcttcatttatttaatatttgtcttcaaaatgctccagaccttttttcatgattatcatgagaataatcagagctcctgaaacagcaaggtatttgacaaataagggagttcccataataaatggcgtgtgtttaagcatgccatagtttccaccgatagtctgattaacgattaccaaagctaaattcagtaataaggtggccacgacaatcagccgctggctgatgggatgagttttataactattaaaaattacattcaggctattgaccagtagggcatagtggccaattaggaaagaaaagcctgtgatatgaggaaactcatagggatcaaatactggataaatcaatgcacagtaggtcccaacaactcccataatagcgaaatagctctttatcctgctatttttcaagaggagaacagtaaacatggccatacgacaatggtacaggggcagactaatataaagtgggaagccctgccagaggtaccaagtgtatagggcaaagagttgaatggcttggataatgagaaaggtccaacgccatatcttattcttataccaacgccaactcaagtaactcagaagtaccattgccaaaagcataagcaaataatagggcaaaggtatctggggtggatgagtttgggtggttgtcaaaaattccttcattctcttctcctgctgaaattactatgcctgctattatatcaaatttcagggtaaagcaaaaacctgcttggagagcaggttagagaacttaattcttagcttggagttcttctacaaccttggctaggttcatagagttagagcctttgagcaagatttgatcgtgctcgcccaggctttctttgatttgcttgaccatagcgtcaaattggtcttcgttagctgttttcttgaaataataaacatgaccaagtgggaacatttgactagcaagttgtgacaattctgcaatgtcttcaccgtagaaaatcaccgtatcaatagcatctggtgtcaggctgagaatcatctgtgtgtgaagttgaacagactgttcaccgagttctttcatatcagctaggacagcgatcttcttgcctccttcattcttaggaatggctgagaaggtctccaaaatgagcttcatggctgttggattggcattgtaaacgtctgaaaggatatcggcaccgttggctgcttttttccattcggtacggttttttgtaagctgcaagttggcaagagctgagaggatattttcctcagttacacccaagtgtttagccacataggcagcaaccatggcatttgtggcattgtattttccagtgactggcaaggtaacttgtccgtctaggaagtttgttgaaaaggtgagatggtccttgaattctgtcaactcagagactgtaagctccgcaccatccccaaagcgtaccacttcaagattgcttggcaagaaaggatctacgataggatcacttggcacaagcaagaggctaccatcaggcataccgtcttgcatttgcattttaccttgggcaatcttgtcacggctaccgaagaattccaaatgagcctctccgattaaggtaacaacggctgtttttggcttagccagggttgacaagaggtgaatgtctcccatgtggtcttgccccatctcaaggacgattttctcagtatcatcaggcatgtggagggctgtataaggaagaccaatctcattgttgtaattgccttgggttttgtaagtacgataggttgttgccaagatatcatgaatcatgtccttggttgttgtcttaccattagaaccagtcacagcaataacatcaacctcagtcttttcaagatagtaggcagctagtttttgaaaggcttcaagagcgtcatcaactaggatgtggacttgatcagctggtaattctttttctgtgaatgtcgctagggcaccattgtcaaaggctgtttggataaaatcatgcccatcacgcgcaccttttagtggtaaaaagaggtcacccgctgtaatcttacggctatcaaactcaatctggttaatggcaacatcttcataggctgtgacatcatttttagcgccaacaaccttggcaatttcatggagtgtcagtttcatcttaaaatcctctgttttatttttacaagtctggcaagaaataagatttccttgtctacaatcactcccaattatatcacaaatcaggctagcttttgcttgggagatgaatttgttacaatggttgatgaaaggattaggcatgacaaagaaaaaattagtcaacctctctaagggagaggaaaccataaaaagcgactgtcaaagtatcgaagaacctaaaggatggcgttttaattggagaaagttcatcctactagagccaacagctgaattgattatcttagtgctactggcactgctgtatggtggtttttattattatgatcattatacagtcaatgaagataacatatatggtctctggcagtctgatcatcataagttagcgatttcctataagcatattcggaaacgaggaaatatcgactggcaagtcgtacaggatggtaagtatattatctatgctgctagaactcgcccggtcaaacggcttaatgacggaactcttcacatggagctctacactgtggaaggctacctgacagacctacccaccaaggacggcttcagctatatggatttctatcttcgcaaaaacaattatcttacctatgacggtgagtcctacaagcgtatcaattctggaaacaagtccatcacttggaaagatggttccaccagcccttatggtgaacggaaaaccaagctctctacaattgttcaaactatctatcgtggaattctgggactgggcttctttattgttattttagaggctcggcaaaagaggagagaaaaactaagtgagacaccaatcaaaaagaaaatacgctgaccgaaagaaactcaatcgaaagtatcattcacaaaaagcatatcgaaaagaacaaaaacgcaaaaccggatggcgagcacgcttggataaatttacagaccgtctagtcaatgtgtttatgatatgtttcttactcacgataccgattttcatcgtctatatgattttctttgatcataatgtttataaagacagtatctatggtctgtggaaatctgaaaatcatcagcttgccatatcctacgaaagagggcgcaaaggaagtaagcgtgattgggatattgttcaagatggaaatgtcctcattaaaaatgcacgcaaatgcacgcatcgatgatattaaacgcttcgaggatggtaccctctacattgaagtttacgctgaggaacgcctgctttcagacctccccgctaaaaacggccttaactatttgaatatgtacgttcgtaaagacaattacctgacctataatggtgaatcttacaaactgattgatgatgaaaacaagagcattacctggaaagatggttcaaaatccccttacggtcaacgaataaccttgtttgatcgtctggaaccttatatcgtatttggaatgtttggaagcttgcttttatatgtccttttcgttgaatggaaaatcaaaagaaaatataaaaaggaaaaataggttaaatgaggcatcaaataaagaaaaaatatagtgatcaacaggaaattgatagaaaagatcattcacaaaatgaatatcgaagaacacaaaagtacaaaactggatggcgagcacgttggggtaaattcaaagaccgtttagtcaagattttgaggatttgttttctattcatggtacctatagtcaccatctatcttagatgcttttatgatggtatcagtgaaaatagtatctacgggctatggcagtctgaaaatcacaagcttgctatttcctataacgaaggaggaaaaagtcgtaagtacgattgggaaattatacaagatggaaaactccttatcaaaaatgctcgaactcagaaaattaaaggtcttaaagatggaaccatctacattgaagtttacgccaaggaaagtctgttctcagaccttcccacaaagaacggccataactatttgaatatgtatgtacggaaggatcattatttgacttataatggtgagtcctacaaaaggattgatgatagggacaaaaccattacttggaaagatggctctacctcggtctatggtgaacgcaaaactttttttgattatattgaaccatttcttttttggggaatgatgggagcccttttcttgtcatgtattgtcatttgttggagaaacataaaaagcaaaaagtgagaaaaaaatcaccctaaaacaagaaaaaccatccctgcttctagctaagctaaatagccacggggtgggtttttattcttattaagcaagactcgcctcttacgaaggctgtcagtcttatttcacttcgccaccttcaaccacgaggtcatcagctttagctgcatcaccgtaagttggacgaagtgttttttcataatctttgtggaagaaattctctttaccaagtttcttaatgtctttattgataaagtcaaggagttctttgttacctttttgaacggctggggcaatggtatctgggttaccaagtgatgtgattcctacttcataacctttattttctagagcccaagcaagaacttctgtattatcagttgagaaggcatcgccacgaccatcaaggagggcttggtaagcatcgctatattggtcatacttttgcaatttgatatttgggtagttcttttcaaagtaagtttcagcagttgttcccttagtaacaatcaaagtcttaccttcaagctctttaacgtccttaatgaccttgtctttaggtgacaccacaccgattgagactttcatgtaaggaagggcgaagtccacttgtttcttacgttcatcagttactgtaaagttggcaagggtaatatctaccttatttgaaatcaagaattctgcacggttggccgcatctactgagacgtatttaggtttaacacccaaatctttggccaaacggttcccaagttcaatatcgtaaccttggtaagcacccttgttatctacataaccgaaaggtttcttgtccgcaaagacggcgatacggagttcaccactcttcttaatttcttcgatggtacgtgctttggctgttgatttaccagagctactgttacttgagcaagcagtcactgccaccaaggcaaagacgagggctaatagggcaaaaattttctttgttaatttcataaatatctcctaaaatattatattttcactaaaaacaatgggttacaaataggcaccaaacttactgaagtcaaagacattgaggaactcttgagctcgctgtgtctttggatgattgaagaattcttcagcagtaccttcctcagcgatgactcccttatccataaagataatacggtcagcgatagcacgcgcaaactgaagctcatgggtcacgatcaacatggtccgtccttcttgagcgaggtcgttaatcaattccagaacctcacgaaccatctcagggtcaagcgaagccgtcacctcgtcaaagaggataacttcaggatgcatgagcagggaacgaacaatggccacacgctgcttttgaccacctgacagttgtcgtgcgaagctatgcttcttgtccagaagtcccacacgattcaaaagtttctcagcctccgcaatgacttcttccttattacgcccttgagctttgaccggccccaaaatcagattttgcaggatgtccaagtgtggaaagaggtcataactttgaaagaccattccgattttctggcgaatcaagtggaaatccttcttactgccagtgatagacttgccatcaaggagaatgtcgcctccttgaatcgtctccaagccattgatgcaacgtagcaaggtcgatttcccacaacctgaggaacccaggataacaacgacttcaccttgtttaacatccaaggagatgcctttgagaatctcattgtccccaaaggactttttcaaatccttgatttgtaaaatgctttctgtcatcttaattcctccaacgattttcaagataagtagacagcttagagactgggtaacaaatggcaaaataaagaatcaaaatcgtgccataaatccagaaagaagctgttggaatagtcaggcggttactgtcgataatctgctgaccaaccttggtcacctcaaccaccccaatcaaaaccaccaaggacgtagttttaatcatacgtgtcactaggttaatagcctgaggcaacaagcgacgcaagacttgtggaataatcacataggtataaagttgcccattggtcaagccaagggcccttccgctctcaaactggtgtctaggtagcgacgtgattgacccacgcaccaaatcacccatctcagccgttccccaaagggtaaagacgataatagccgatagctcgcctgagatattgatgttaaagttcctagccagaccaaaataaacaataaagagcaagaccaactggggcatgatacgaataaattccagataaatacgtgacaagaaacgaataatcttagacttcgaagtcatgacaatcccaaaaagtgttcctagtaaaagggacagaagaaccgagacgatggaaattccaatagttacgcctaaaccttgtaagatacgtaggaaattattcccctgaagaagaacctgaaagcccgaatcctgcatagcgtaacctcctttcaatccaactaaagactagagaaatcggcagcaacatcaagagataagccaccaccaacatacctagagctacatcggtttcgtagtaaagaccaatcaaatccttggccacatacatcaaatccgccaaggctaccgctgagaatactgacgtttccttgataaggaagatgacgttagcactaaatgacggaagcgccacagccactgcctgaggaaggaccacatagcgaaagacttggaatggcgtcaaaccaatagacaaccccacttcatgctgggtctgactaacagcctctaggccacttcggaaggactccgccatataggaaccacccaagaaaatcaaacctaccacagcacaagcctctgacgatagaaccaaacctatacgaggcaagccaaagtagagaaagaaaagctgaatcaagagcggcgtattacgagataactcaatataagccgtcgaaagctgactcaaaatcggcactcggtaatgacgaataacactcaccaccaagcccaaaaggaaggaaccaagaatccccagaacggcaatatgtaaagttaaaaagaatgccttctgataaaagggcaaatactgttgaacaatggaccagtccaaaacttacctcctcaaaacaagatacaaaaggcgtagaaaattccgtaagacaaataggaaactgacgacgtgtgctggcacactaggaagtttatcttttgctctaggaatttagcctgtgttcaattctacaagatacaaaaggcgtgtaaaatttcgtgagcactcactgccatctacttctagccctttgaccttcactcgcctctgataatcatcgcgatacgcaaatcttcatcaaacacgaacgaattgctttatttcatttgaaacgttagatttattctaccacctgttagattatttggataatatgtattttttatcgaggtgataaagaaaagatataaataaaatctagatttctgtaaagaaaaaaacacctcagtctcagagatttctccgagactaagatgtctgtgttctaaatcatatttcttaaatcaaatggctttcacgtttatcaaacatttcttgtcccaaggttaccaattccttgataaggtctgagtaagaaagtcccatattttcccaaagaagtgggtacatagaccattgagtgaaacctggcatagtgttgagctcgttaaggtagatggctccatcctctgtcaggaagaaatcacagcgggcaagaccacaaccaccgagggcacggaaggccttggccgcataggcacgcatttgcgtcatgacttctgcaggcacgtgagctgggatgtccatggtaatcttattgtcaatgtacttggcttgatagtcatagaaagccacatctttgactacttcacctggatcagtcgttttgacatttgtattgccaaggataccaacctcgatttctcgggcaaccacaccttgctcaatcaagatacgactatcatatttgagtgctagatcaatcgctgcacgaagctctgcttcattttcagctttagaaatcccaacagatgaccccatgttagcaggtttgacaaacactgggaaggttaatttttcaagtgtctctgctactgctgcttccaaatcttcaccctcgatgaagactgtgtaggcaacctgaggcacaccagcaacttcaagaatatgcttggtcataatcttgtccatagccacacttgaagaaagaacattagtacccacgtatggcaatttgagggtttcgaggaaaccttggatagaaccatcctcacccattggaccatgaagaactgggaataccacagcgcctgcttcataaatatcgctcggtttgatagcctgactagccacaactgtgtcattagtcatgagcttctcgtcatcacctggtgtttctgtaaattcttgtgttttaataaaatcaccagactgagtgataaagtaggttttaacctcaaatgcgctgtaatccaccgcacgcataacactctcagctgagagtacagacacttcacgttctgctgaacgtccaccgtagagaaggataaggatttgtttagacataggtataccgttttcttttcttgattttctagtctcaattttgagaacataattaccttaatcatatcacaaaagagagggattttcaaaaagattatgggcagaaaaaacagcctgatagctgtttttttcctgtcttaaatttcatcaccaagttcgaacttagtgcctttaagggcacgtttgagagaccacttccatggtttaccttcgatagtgacttgtttgttttcgaggtcaacttgaaccttgtctacgcctttgacagcagagagtttttcggtaacggtgttgacacagccttggcatttcattcctgtaatgttatatgtttttgtcatttttctttcttccttttctttaattattttttttgatacacagcttaagtggcgggagttataagtaactgacgcttaaactttgcgacgtttgaggcggagagcattgaggacgactgagacagagctaaagctcatggctagtcctgctatcattgggtcaaggagcgggccaccaaagaggtggaggacacccatggccactgggatagacaagatattgtagataaaggcccagaagaggttctctttaatcgttgtaatcgtcgcctgactaattttcaaggccttaacgacatccatgaggttgggtttcataaggaccatatcggcactttccatggcaatatctgtccctgatcccatggcaataccgatatctgcagtcgcaagggctggggcatcattgataccatcaccaaccatgatgactgattttccttctgcttgaaggtcgctaatcaccctagatttctcttgcggaagcacctgactgataacacgcttgataccaaccttttgagcgatggcttgggctgtttggtcattatcaccagtcaacatgatgacttccttgcccatttgatgaagagctgccaccatatcagcactatctgctttaacctgatcagctacaccaaagagtccgattaacttaccatcttcagccaagaaaataggtgtctgaccatccgctgtcaagctttggaaatcagcctgtgctgaagtcaagtcgactttttcctcagccataagagtttgattcccagctagataagttttgcctgcatagcttgcagtaagtcctcgtccagtcaaacttgagaaattgtccatctccaacaagtccaagttagcattttctgctgccacaaggatggcttgacccaaggggtgttcagacttggcttccaaggatgccaaaagctgcaaagctgctccgctatctccataagtatagctagaaacgagctgaggtttaccctgagtaatggttcctgtcttgtcaaaaacgaggacatcagccttatgagctaactcgagcacatctccacgcttatagagaataccatgctcagcaccaagccctgtaccaaccatgatggctgtcggtgtcgcaagtcccaatgcacatggacaagcaataaccaagacgctaactgctactgtcatggcaaatgtaaaggtttgtcccatgacaaagtaccagaagagacctgaaacaagggcgatagccataacaacgggaacaaagaccgctgacacctgatcggcaatcttggcaatcggtgccttggtttgttgggcatcctcaaccaatttgatgatttgggaaagcaaggtgtccttaccaatcttttcagcctcataaatgagactaccctgaccattaatagaacctgcaaaaactggtttaccagctgatttttcaataggaagcgactcacctgtaagcatactctcatcaatagcagagctgccagaaatcacttgaccatccacggctatcttttccccaggtttgaccacaatatggtcaccaagaacaaccttatccacaggaagcttgacttccttaccatcacgaaggacagttgcttccttggctgacaagtgcatgagtttcttgatagcttctgaagttcgacccttagagagggtttcaaagtacttaccaagagtaatcagggtcaagataacggccaccgactcgaaatagagttggtgaacgtgatgggcatgccccaatgaaatgtggtaagtaccataaagactataaagaaaggctgccgatgttgccaaggctaccaaggcatccatgttaggatgacccttggccaaggtacgaaaaccattactatagaaggaacggcccagccacatgacgggcactgtcaaaactagcaaaaccaaggcataagtcaaggcttcatgatgaggagacaagaagtttggcacaggtagaccgaccattggacccatagctagataaaagaggggaacggtgaagattgatgaccaaatgagacgctcacgcaccttgtgaatcttgtcttcttcacgttcttcctgactcttagctgtatctggattgtagacttcagcttcataaccagcgtcagccacagccttttcaatagcttctggactgaccttatccccagcataatccacagacattttttcggtggttaggttgaccacagccttgtccacaccatccaacttattaacagcattttcaacattggctacacaggatgcacaagtcatcccattaaccacaaaggtttcttttgccattcctatatcacctccatatgatgcccacaagcacattggccaggcacacagtcacacaccacctgatccacaggttcttttgctagaagcaaggcctgtaacttatccacatcagcttgcgtcatgggtgtcttttcgataagttgccccaacaaatcgctgtgtttggtcaggcaaatcttatcaaaaacagcctctaaagcttgaaaattcgcttcatcttcacccaagctagcttgatagataaaccctcgtccttgacgctgactggttaggtaacccttgtccgctaaacgtccaagcaaggtcttaactgtcgaagccgaccagtctagcttcttagctagaatcgctataatctctgaagaagtcgcttgccccttagcccagagcactcgcatgacttcccattccgcagatgaaattgtcagcatgataactcctttctgaatgtcgccattcgtttacgtttgtagatttattttaacgctatcttggaaatgtgtcaagggttttgtttacatttgtagatttattttttaaaaaattccaagatcactttaaggaccttggaatgttttcattatcttaggcaaaaaattatgtcttcggatttttctgatgcagtttagtcataagcattattcccaagacgagtataatgatagggatactatatcccaaataaatcgtagtgacctgcagacctctcttgataagcataccactgacaaatacaacaatccctgtcaaaacctgattcaagacttcgattttcaaataaagattgttgagctgtagaggattcaacttctcctgcaggtaaacgttttgcgagattccagaaatagtttgaccaactgctaaaaagatataactaagcaaaacagtcggtaggttaggtacgaatggaaagacgacaacgtaacccaaatagacaagagaccctaacaagtaaacggtcataggggagtatttagtgagacttttgaaagatagaattgaactcgttgctagaaaggcaatggccaagaaggacagagagaaagaataggcctgactagaaataccgacatctttggtcaggaagataacctcataagcatcatataagacacccactgactgtaagagtatagtcatcataaccatcttaaggacgacactctgccttccaaaaataggactaccttgactggaagaaacctcctcttctgattcattctcacggtcaaaaataatcggtcccagtttaaacaataagagggttgctagtagcgttagcacactgtagaccaaaaataagctccctaaatcaaggctaccccagagaccaactatcataggtgctaagaaataggaagctgacccaatcatggtataggtactgttaaatttttgcaagttggcttttttaacaagcacaggcaccgctgaggacaacaaactgttaaagtaagtcgtcagcacttcagtcaaaaccaccaaagcaaacacaaaaacactacccatggcaagatagatcaaagccagacagactgccttaagcaattcaataccaatcaaaacatattttttatttgtgatttttcctacaaattgatgtcccacattggcaagaatccctcctaagaatttggcaatccacagccctaagacatagtccaccgagattttagaaaagataatgctcagtgctatcgcatagccatactcgataatcagtgacaaaaacctatttaggaaaataattctggaattgttgttaaacattagcgatttctaaaccttttctttttcattgtccttattgtaacactgaacatactagccttcaataagcactgacaacttgaccaacgcattagaaaaacacctcctaagaggtgccacactttactaagataagactgagttaacgaggctacgtccaaaatccctgccttcaacatacaaaaatttaaacatatcagggtaaataacagccaaacaaataatcataaagagtattgctagagctttcttgtgtgatacaaagaatgaagaaatataatcaatcatgttcagagataccttctcttccttacttttttagctctaaataaactataaaatcattctatagttttcgaaaagaaaaaaatagtgacatttatgtcactaaaaaggcttattcattcgatacgagatatacaaaagctgattacgagcttaactctcaactcaagcccttgtagaaatacaaggcaccaaccaaaaggaaaatcagtgcataatgattctctccccgatagaagaatagtaaggctcctattaagaaacagacccctagtattaccctcaatgatactttcatgtgtctaccttctttctataagtaagatgaaaataaaaacaagagatatatttaattcgctacaatccacccatattataagcttgataactaagaaaatcaaattgtcccaaagaatgatttgataaaaaatactccccatttctggagagtagcatctgctatttttcaaagtgtgaaccgaatgtaacaaattcagcgacttcttcttccttaccgtcgtggaggtcacggacaatttttgatcccacgataacaccgtctgacacagcgttaaaacgtttgatgtcttcctctgttgatacaccaaaacctgtaagcactggaatatcagcatgggcagtcaagttagccaagtgtttgtcaaggtcatcacggtaattaccagtcttaccagtaacaccattgatggcaacggcgtagataaaaccttctgctccatcaatcaactgtttctgacggtcaatacctgtagtcaagcttaccaaaggcacgagagcaatatcactgtctttcaaatatggggtaataaagtcagcgtgttcatctggcaaatcaggaataatgagccccttgacagatgtctctgccaagtccttaacaaaggcttcaataccatattgataaactgggttgatgtaggtcatgataaccaaaggaacctgcgttttttgttcctgaagcttcttgataatagcggtcaaagtcacatctttagccaaactacgctgtcctgctagttcaataacgggaccatcggccacagggtctgaccatggaatacccacctcaatagctgagacaccactattttccaagagagcgatagtctcaaagagcccgtctagacctttagcgtggtcaccagccatgatataaggtacgaaaataccgcgtttactgtctttgatagcttgtaggtgttttgttagtgtttttgtcatggtttatttcccttctgcttcagcttcgaaacgttctttaacctgcataacgtccttgtccccacgacctgagaggcagacaatgaggctttggtctggcgacatcttagctgccactttttgcgcaagcgcaatggcatggctagactcaagggcagggataataccttctaaacgtgacagaagtttgaagccttcgagagcttcttcatctgtgatagagtcgtaagtcgcacgtccaatttcgttgaaataagagtgctcaggaccaacccctgggtagtccagaccagctgagatagagaaggcttccatgatttgaccatgagcatcttggagaacatccataagcgctccgtgaagaatacctggacggcctttggcaaaggttgcggcatgtttttcagtatcaagccccaaaccagaagcctcagcaccatacatggctactgatttatcattaacaaatgggtagaacataccgatagcatttgaaccaccaccgatacaagccattacagcatcaggcaatttaccgccagaaatctctgcatattggcgcttggcctcacgaccgatgacagattggaagtcacgaacaatttctgggaatggtgcaggaccaagggctgatcccatgatgtagtgcgtatcctcgatacctgcaacccaagcacgaagagctgcatttacagcatccttaagcacgcgcgaaccatctgttacgctaaataccttggcaccaagcaactccatacggaaaacgttaagcgcctgacgtttaacatcttcttcacccatatagatcgtacagtccatatcgaaaagggctgcggctgtcgctgttgcaacaccgtgttgacctgcacccgtttcggcgatgattttcttcttgcccatacgtttggcaagcaagacttgaccaagggcattgttaatcttgtgggcacctgtgtggttaaggtcctcacgtttaagataaatttgtgccccaccaatatggtcagtcaaacgtttggcgtggtaaagaggtgtctcacgtcccacatagtttttgaggaggtcatccaattccgcttggaagcttggatcttccttggcttcacgataggccttgtccaattcaataacggctgtcatcagcgtttcaggaacgaactgaccaccgaattttccgtaaaatccttttgcatcaggttgttgatatgtcatgctttcactctttctataaatgctttaatcttgtctaaatctttgtgaccatctgtctcgacacctgaggagacatctaaggcatagggctggaaagtttccttggcctctgcgacattgtccacagtcaagccaccagcgatgaaatagtcctgctcaatctgcttgtcagccaagagttgccagtcaaaggtctgaccactaccagcaatgggagcatcaaagaggagataatccgcctgagtcttgacttgagaatcactatccgaaatctgaatagctcgaataactggtactgaaatctttggaatcagagcttcatcaaaatttccatgaatctgaacgatatctaaaggaacctgaccaatcgcttcttccagttcctcaagacttggtgaaacaaagacaccgacgatttttgtctggcctgtcacccctttagctagctcgtgagcttgttcaagactcacttgacgcttgctcttggcaaacacaaagccaatgtagtcagctcctgcttcaaccgcagttgctactgcttctggtgtcgacagtccacaaattttaacctttgtcaatttgcaactccttgaccttttcagccacattgtcagccgtcataagggcagttcctaccagaatcccattaaaatatggggcaactagggcagcatcctgacctgtaaaaatagccgactcagaaatataaacaggcttgtccttgaaatgcgttgataactctagactggtgttgatatctgtctcaaaagtgaccaaattacggttgttaacaccgataatctctgcaccaatacgatgagccacttccaattctggcagattatgcgtttcaaccaagacttccaagccaaggcttgtcgcaaaatcgtagagctccttgagacgagcctctggcaaggccgctacaatcaagagaatgactgtcgcacccgcattacgactacgcacaatctgtttctcatcaataatgaagtccttagccaaggttggaatagccacctgtgacgaaatttctttcaaataggaaatgtcacccttgaagaaaacctcatccgtcaaaacagaaatcatagctgccccattttcctcataggtcttggcctgagccacaatatccacatctaggttaatatcacccatgcttggactagcttttttcacttcagaaataatttgcagcttgttttgatttgacttgagaaaatcataaagacgataggtctgacgtaagggctgcaagtcttccatgaccaactgggccacttctttttctttttgttctaagattgttgggagaaaggctttactcatacttgtacctcttggagttggcgaagtttctctagggctgagccgtccgcaatcaattgacgagcaagctcaacaccttccttaatagtctcaaccttaccattggcaaagaagcctagacctgcattaagcactgttgtttcaagataaggactagcttcatttttcaagacactaaggagaatctctgcattttccttggcatcgccacctgtgatgtcagacaactcaaccttttccatacccaaatcttcataagtgaaagtgtgctggctgatgtgaccatcttccaaaagggtgtaggtgttagtgccatagagggcagcttcgtccatattgtcaggacctgtgataataaccgcacgtttacgtcccaactgttgaatagcattagcaacaatctcctgcaattccacacgatagagccccatgagttgtgtctcaaggtcaagtggattagccagtggcccaaccaagttcataatcgttggaatcccaagagcttggcgagctggaccgataaaacgcatagctgggtgcatggtttgggcaaagataaaggccaaaccaacctcgtcaagtgctttagatagggtttctggtgatgccgcaacgttgattccaagggcttcaaggacgtctgccgaaccagatttagaggaaatcgaacggttaccagccttggccatacggataccacccgctgctaggacaaagcaaacagtagtcgaaatgttaaagctataagactggtccccaccagttccacagttacacatagcatccgtgaaagtctcaggcaagacagtcgcatgtgatttgagggcacgcacgatacctgtgatttcatctgctgtttcccccttagtcttaagccccataaggaaggcagcgatttggctttctgagacttcatttttgagaatacggtcaaagactgcttggacttgatcttgagacaagtcttggctgtttgagatttgtaggaatatttctttcatatctgttttccttttaaaaactgttcaatgttatctgatgcacgcgagaggttttgagcgtagacaaatctagtccaaagactatccaactagcctgcaacgattttaacgaaattttcaaccatcttaagcccatctggacttccgatgctttctgggtggtattgtaaaccgtaaataggtagctccttatgctgaatggccatgatttcttgatcatcagttgtaatagctgtcacatcaaagccctctggcatttggtcaacaacgatggaatggtaacgcatgattgggacatcattgtcgatatccttgaaaataggtgatggcgtttcaaaagtgatgttactttgtttcccatgcatgacattcttagccaagccaagtttaccaccaaaagtttccgcaatagcctgatgccccaagcaaattcccatcatcggttttttaccagcgaaatccttgatcaaggcttccattttacccgcatcagctggccaacctggacccggtgaaaagactaacccgtcagctttttctgcttcttcatagaggttctcatcatcgttacgcaagacctttacctctgtaaatgtccctaggtattgtgccaaattataggtaaaagagtcatagttatcaactaataaaatcattgggcatctcctattcttgtcatagctttcgccttgttaatcgtttcgtaaaattcattttcaggaacactgtcgtaaacaacacctgcacctgcttgaacataggctttttgatttttgagaatcatggtacggatggcaatggcaaagtccatatctcctgtcgcagacagataaccaatagctcccgcataaataccacgtttttcctgctcaagctcatagatacgacgcatggcacgaatcttaggtgctcctgacacggttccagctggtagggttgattttagcgcatctagtgctgtcaattccggcaagagttgtcccttaaccacactggtaaggtgcatcacatagcggaaatactcaacctccatatacttggtcaccttgaccgtaccatttttagcaatcttaccaatatcattacgtcccaagtcaaccaacatacggtgttccgcagtttctttgacatcatgtgagagttcatctgccaaagcagcatcttcagcctcattggcaccacgagggcgagttccagcaatcggattggttaccacctctccattcttcactgaaaccaaactctctggactagcaccaatcacctgatagtctccaaaatcgtagaaataaagatagtttgatgggttggtcacacgcaagttacggtagtaatccaaaggatctccctcaaagtccgccgaaaagcgttggctaagcacacattggaacatatctccctcacgaataagttttttggccttagccaccatatccatgaagacttctttttcgatatgatttgaaaattgcaaggcttgcaaggcttgaggtgtaaactcgtttggcgcctgagtctggaggttggttaccacctgaccaagagcttgacgcaccgcatcgttgtcacgaccagagtagatattgtcctcaaccacatagaccttttccttcttgtggtcaaaaatcaaataagactcatagatgaagaaatgcatatcaggtgtcccaatcgtatcttctggaatttcaccgatattttcatagagaccaatcatgtcatagcctgcaaatccaatagcaccacctgcaaaaggtaggtcagacttgatgcccttgactgttacttggtccaagtattcgaaaggatcttgatcaatcgccttaccattttcataaagaacaccatccttgaaggttacttcaaagaccggattgtaggcaacaatagaaaaacgtgcattttccttctcacgaggaatagattcaaggataaccttgtgttccccctgaacacgcatataagccaagattggtgttaaggtatcggctggtaaaatttttctcataatatttcctttcaaactggtttatcgagagtaataagactgatgcaaggctcctttataggatgtattggcaccatattattctttgttcactttctcttccaaagcaataaatgctttaatcatgcttctccaaacactttcagccacatctggagataagccaagctctagtgcctccttacgacggtttgctatcactcgagcaacacgatcactagcctggacagcaaccttgtctcccttgggtttaagccgtcctgccttttccacaagtatttgacgttgggccaatagtcgaagcaactgtctgtcaatattatcaatgtccattcgaatatcgcttaatgcatccataaatacccaacctttcattgaataatgaaataacacttctttaaagataaaagtaaacaaaaaacctcacagagaaaaactctgtgagggcattaaatctagtttaacacggtaccacctcagttaatggtctccaaaaaaacgaccatcatctctatctcctctaacaaggagttgcacggtaaggggtgccaaccgagaaggatatgtattaccttctcattatcatccaatcagcccaatgttcgctcatctcgattacctactcacaatcaccgcaggctccctgaaaatctaagaccagttactttctgatttactaactattgtactcctttttagagggatgtcaagaattttctgttaattttgacaattcctcccttataagattcgtctatacctaattcagagagtgaggtagtcttatcaccacactttacaaaataaaaaagccccaaaagggacttcttggtttgataaacaacggcagggtgacagtcctgcatctctttcagacccgaaggtgcggcggctgcctcttccgccctcgttgttacttcttacttatattatatcacattttcttagctctaccagcatttagataatttttcagcttagaatctttaatcacaaacatggtacggacattaagtttatcacataatctgaccgctaccagaacattgccatcaatacgttttatatattccaaggactggccattaggatggcgaccgatatagtccggatgagcaataatctctggaatacgttcataggtagcatcaaaatcactgaattcctggcgatgtttttccatatgcttcttacgttgtgcagacagcgtgatttcttcaccaggcttgtagtccaaatcaaaagctttaatgacttttggcgtcaagtgccctactgttttcatgcctctattgtaccatacctcatacacatcaaggcctttcctactgttgaggtatcataaaactcaagcctgttaccaagctcgagttttgacttatgctttttggaaagctccttgtttgtagctaatccagaagaaaagcggtgtacagatagccattgctaccagatagattggtaaggtgtagctattaagtgtcgaaatttcaatcacatctcgaagatagtaagagctgattaagaaaccaaagactgagtaaataatcaaggccacacgtcccttattcaacgggatacaagcacgaataacggcaaggacacccgttgatcccatcatatagtaagacagcgtcagcatgtccgtattgctcatgccaagatagacctgagatagatggaaaataagaacactgataaccagcattaaggcattaggaatagataactggagcgaacgtctgaggaaatgtttctcaacaggtcgaatattacgttcgaaggtcaaaataaatggtggaagaccctcgataaattgccccgccaaagtcatctgaacctgaatgaatgggaagaccaagaggtactctgcctttccaaaaacaatactggcaatacagataagtcccaaaaggaaggaatagaccgttttgatgaggaaaataggtgcaatgtgggcaatattattaaccacacgacgtccctcaaatagaatttcaggaatatccttaaactcagaatccataagcaccaagttggcaatctgacgtgtagcgggatccccttcagccataacaatcgaacagtccgcctcacgtagtgccaagatatcgttgacaccgtcaccagtcatagctgtggtatgcccattggcattaagcgtttggattaacaatttcttctgatgcggagatacgcggccaaagattgccgtatcttcagccaaagcctccaactcctcatcactgaccttagaacagtcaatatagctttgataattcgcaaaaccagcctggtgagcaatatgagaaaccgtcacaggattgtcaccagaaataatcttaagcgtcacatcttctgaacgtaggtattccaaagtttctgcagcatcctcacgaataggatcggcaatttcgagcaaggtcaagccttcaacatcattcggcaaactcatagtctctgtatcaaccgctgactgactccatgccaaaatcaaaacacgagaaccacgagcctgcgcctgatcgactgcttttggattttcctcaagaagcatctcaggcgctcccaaaaagagagttccgaccccgtcaatgctcatagcaccccatttacgatcacttgaaaatggaataacatcccctacctgataatgatgctccagaccttcataggcatttcgaatcgcctgagccgttgcattgttatccttactatgctgcatataagccgcaagcaagcactccaactcctctttagtgaaacgctccgacagtcgtttcaggcccttaacggtcatcttgccttgcgtaattgtcccagtcttatctaaacaaagcacatcgacacgcgccaaggtttcgacagaatacatctcctgcaccaggatatgtttcattccaagcttaataacagccgtcaaaagagaggtaattgtcaaaagggcaatccccttaggcaacattcccagaagggctgtcgaactggtaactactgactcttgaagagagagctgtttaatcaagtaagcctcaaaaaagagagcgagcccaaatggtatcacaatcttgcccgtaaacttggcaatcttgtccatgttatagaggatacgtgacacgattggcttatgtgttttggcctctagcatgagcttattggcgtaattgtcctcggctacgttaatgaccttagcataaacctgaccactaacaaggtaagaacccgaaagcaactccttcccatccttcttgagaataaggtcactctcacccgtcagcatagcctcattgagctcagccatcccatcaacaaccacggcatcactaggcacctgttcacccgcagacaagagcataatatcatccaagacaatatcctgaggatcaatagaagtcacctcgccatcacgcaccacacggatctgatccttattcatgagattgagcttatcaatcatgcgacgggcacgcaactctgtcatcatccccgtaaaggcattaagcacaatgattccgaagaaaaagagattcgaccaagcctgaacagcaatcaaggccacaaaaatagcaaaattgagcatattaaaggagttaaagacattacgtctaaaaatctcccagttgctggagccagtttttgctttaaaatgatttgttttaccggcatctatccgccgcttgacctccacctgcgtcaaaccttgtaactgttttttcataactttcatagtagcataaaaatgaggtgttttcaaaggttagccgtcatggatagccaggaaatagacctattatatcgaaccactctcccaactatttcactcaacctaaactactttcaaatagtaaaggcaggagtccctacaaaacacttctatgctatccttttctctagttaaacctactttgataaattaaattaaacagccactgaagattgatcaagggttttgtttgaaccttcataattggggaaaaatcttccctaatctctcgtttaatttgtgattcattaactttagttctttttgcttcttctgaaaaataactgacgtggtcaaatctaaacgtactgtcaaaaccaatagccatattatccttatcatataaaaagcttcctaagctttttgttaaaaaagttttgcttttagtatttataatagcatttgttccatcatcgtcgtatcgaataccatcaatctccggcgtataaatccatcccatattctctaccaacataacgagatctggctctgtccccaccttatgagggatgtgctgagcataataaacagagtggtattttaaattaaaaaaagtaaataggctcattcctaagactgtatacagccctataattagtcctacaaaaatcgccaaaatatttcttttttgcatccttatcttctctttcttttttatctccaatcgaattttgactggattaacaataaaccattgtaccgtatttatcataagtcttacaatttaatgatttgcaagtgctctaacatttgttatgaataagaaaaatcaagtctttacaaatttcttcaatacttctcctcactttgtcaatcaagctaaacatggtataatagttgaggtcttgactgcctattctataagccaaattaaggcatcaaaaagtaacaaacaagggctaaccccttgatatgaaaggaatctagaaaatattatgatgaacatgcagaacatgatgaagcaagctcaaaagcttcagaaacaaatggaaaaaagccaagctgaattggctgctacaaccttcactggaaaatcagcacaagacttggttgttgctgaattaactggtgacaaaaaagtggttaacatcactttcgctgatgctgtcgtggatcctgatgatgtggaaacacttcaagatatgactgttcaagcacttaacgatgctcttggacaaattgacgaagcgactaaaaaatcaatgggtgcctttgccggtaaattgccattctaaaaaataaaaaggaatctcgcggttccttttttctatacactcattaagcaattcagtcataacatacaaaagacttggacaagaaatccaagtctttttgtgatagtcatataaaaattttattcttcaaccaaagcaagacctgactgtgcgtcttcttcgttggccaatttatagcgattcttttgacctaagtagatgctcgccgaatttaatgaactttctaaagtagggtaattcacatcttcgttcgctgtttgggtaggtacaggtcctgaaattaataactcatcatcattcttgacataaatctggtattctccaacttcgctagtttgagctaaaatctcattcaacaagtctggggcgagcgtttgagcgacgccatcaaccacttgattagagtcctgcttatgctccgacgaatccactacttcagtgataacgatgtaatcaggagtttcctcatctgaagtcttagatccttcagtttcttgctgtttttgtccaggtgtatcttgtttcttcgtatcttgagcttgcccatcatgagtcttcaattcctcatcactaacggtttgaaccttagtctgattggcatctaaatcaagttttggcgcttctttaacgtcagctgaagctccactggtacccatgaatagagctaaagtccccaaagtagcaatcaagctgattattgctttgccgataaaaccattatctttgttcttaatcataaatccctcactattaatttggttagctctaactggctaacaacgcgtctaatttgctgctgtaggaggtaaaaggttggttgagctgtttgaccaacccttcacccagataacaatcttagcatgcaaaacccttgatttcaagcatttctttaatttttaagcattttaaacaaatgacaacttcatgtcttaaaattgatgacaatctattatcagattagcttttttaagctatgcaaatggtaatttctttaagtagtacttagggaaataatacttgttttttagacagattcttcaaaaaccacttttgctgactcatctccccaaaaattttatcggatagcaaaattctgtccaaacactttcaatgtaactataaaatagaattcttgtgtcaggaagtggaatttcaacatcctaaaataagattagaaactaaaatccctcaattaaccaaaagaaatctataacaataggatttataaacaattttataaaacacatcccaataaacaactcattctaaagatgaacattcctcatttaaatatcacattttaaggcatttacaacttcttaaaaaataactaacacacaaaaaatgattacaaaaaggccgctatttccccatgaacaaattaacccatatagaaaatgtatcttccaaatgcaaaaaaatagcggtattctggatagatccgtgctcgaaactatgaaaaactctttattcatcatcgactctgacgcaaaggcaaatcccctttgaaactcctatggtgaaacatttaccgacctaagctcttcgacaatgatggaaatttggaaaaacagtaaatctactcagtaaaagactaaaaataacctaactttataactattccaccaaattttcaactcactcaaagctcatctagaataggtttttctcatgtgtaaacgcttcactcaaatttctgtcacatgtaagaaaatcttatcgtcttttaaaccttttttttgctacaaaacctagatattccaaggaaaatccgttacaatagagtacggaaagataggtaattatcagcatcattattttcgtatgaaagggaaattcatggcttatattcaaatgaagcatagctataaacgctataaaaccggtgatctggaaattatcgcaaacaacgacgtaagctttgatattgaaaaaggggagcttgtcgtcattctcggtgcctctggtgcagggaaatcaaccgttcttaacatcttgggtggtatggacaccaatgacgaaggtcgcgtcattattgatggtaaggatatctctgaatacacagccaaagaactgacaacatatcgtcgtgaggacgttggctttgtgttccaattttacaacttagtttcaaaccttacggccagggaaaacgtcgaactagcatctgaaatcgttccaaacgctaaagatgctactcaaacactcgtcgaagtcggtttgggagaccgcttagacaacttcccatcacaactatctggtggggagcaacagcgtgttgccattgcacgcgccgttgccaaaaatccaaagattcttctttgtgatgaaccaacaggggctctggattatcaaacagggaaacaaatcctgaccctccttcaagaaatggctcgcaaacagggaacaactgttattatcgtgacccataatgcttctctagctccaattgccgatcgtgtcattcgaatgcacgatgccaagattaagagtgtggaacttaatcctaatccacaaaaaatcgaggacttggaatactagaaaggagcaccgtcatgaaaaaaacaacttattggaaagatgtttggcgaacctttgtagcttctaaagggcgtatgctctctattgccttacttatggcactgggatcctttgccttgattggtcttaaagtaacttctcctaatatgaaaaaaactggggaacacttcttcaagacgcatcaaacagctgacttgagcttaatcagcacttacagtatcaaccaaaccgatcaggaccttctcaattcgattaagaaaaagaatgtagacatcgaatatggttatttcaaagatgctgttatcaaggggacgaatacggcatttcgtattttctctaaacctaagaaaatctctacttacgaccttattgaggggaaacttcctactaaggacggggaaatcgctctttcctcaacttataaagaagaatatagcgtcggagataagattaacttttctgagccagtagatagctcagggcaaaaacagttaaaggaacaaacatataccattactggttttgttaattcctctgaacttctctctaggaaccgtcttggtaatgccagtgctggtacggggaaactggatggctatgccattgttccagagacggacttcacctctaatgattacatgattgcccgcatccgctacaaggatttagaaaacgttagtccttttagtgaggaatacgcaaataagatttctgaacgaaaggctgaactcaaggaactctttaaagacgaacctgagaaacgcctcgctgaaatcaagtcacagtctaaagctcaaattactcaagctaaacaagaacttgaaacagcactcgcacagacccagcaaatggctacaagcaaccctgccgaagccgctagcgtcaaagaagctactaccaagattgaagccaagcaaaaagaactcgaagaaagtcaagcaatggttgataatttaccagcgcctagctatcaattctactctcgtcgagagattccgggttctgagggatatgttgcatatgaaagtaatattaacatcattcacgatgtgagtaacatcttccctgtcgctctctactttatggcagctttggttacctttgtaactatgggacgctttgttgaagaggaacgtggtaaggctggtatcttcaacgccctaggctacagtaattcgcgaattatccataaattcgtcatttatggtttgataacgagtattactggtacaactgcaggtgttattaccggtcatacactacttccgattctaatccacaatacttataagagcgatttgcagcttcctgctttcgaattgcacttctacctaggacttacccttgtggccttccttttaggtctcttatctgctgtgctacctgcctttgcggttgccaagaaagagctctgggaaaaaccttcccaactcctccttccaaaaccacctcgtgcaggagctaagattgtcctagagcgcatcacacctctttggaaacgtctcagctttacggaaaaggttaccatgcgtaatattttccgctataagcaacggatgtttatgaccctctttggtgtcgcaggttctatcgcactgctcttcgcaggtttaggcattcgatcttctgtatctaaccttaaccagcaacagtttgaagatatcattcactatgatatgattgttgccaagcaaccaaatacgtcaagtgctttggatgaggaactcactaaactcctcgatagcaaagacgttaaagaatacttgaatttccattttgaaaccttgcaaaaaattgccggtagcaacaaggacactcaagaaatctcaacccttgtctttaacgaccgtgacgataaactcgttgatagttacgttagcttgcatgaccgagaccgtaataagactctcaagctatctaatgacggagctattatctctgaaaaaatggcaaaactcctaaacctaaaggttggagataccattactgtgcaaaacagtcaggatgaatctgtcaagattaagatagctggtatcactgaaatgtacatggggcatttcctctttatgaatgctagctactaccaaaaagcttttggaacaccttcagtgaataatgccaaccttgttactctcgctgaaccaactaagcaaaatgttgaaaatatggcagccaaattcatcaacttacctaatgtttacggtgttgttcaaaacaacaaccttaaactgcagattagcactatggtcaattcattgacacaggttattggtatcttgattacggtttccattctccttgctgtggttgttctccataacctcactaacatcaacgtttcagaacgtatccacgaactttcaaccgttaaggttcttggtttctacaataacgaagtatccctctacatctatcgtgaaaccatttacctttcaatcatcggtatcttcgtagggttcggtcttggacaggcacttcaccattatatggtaagcatcattccgccagatcgtatcatgtttgatccatctctcggattggctacctaccttttaccagctgttcttatcggcataatccttattattcttggcttcgtcgtcaacaaacgtcttgccaaacttaacatgcttgaagccctaagctcagttgaataagctaaaaacgcctgagaagtaattctcaagcgttttttatgttcgataacctattttgttttagtcttagccaactctagacagtaggtcttcacatgacaatgaggacaagtcagcttacgagtccttggggtatgtccggcaagagcaaattctttaaaacttggatcaaaggtcctatgacaattaggacagaggtagtcgaactgctttctatagtgaaacatcactaaattcattactataataaaagcaggacagacaacaaacaaacctctgggatccttaaaataataaatgacaaccagtaggctcatcagataaagaagggagattagaatgacactcccaaatattctcaactgcaaatgacgccatgatttttgattttccataagacgtgaaatgtctgacaaatcttccagcgaaagttgatgtcgtttagcagttgctttttgcaagtgacgggcacgttttagtttgacctctatttcctctgaagacttttccaagctttcaatttggtctgtcaataaaagctctaaaacctgttccctattctcctcttgcaagagtttttggatttgtttgattgagaaatccaaatctcttaagaaacagatgacttgcagtcgttccaagtctgattcgtgatagattctccgaccaccctctgtgacttcagatggtgtcaagatccctcgttgatcatagtactggacagtcctaacagacacttctgctgctttagccaactctcctgttgaaaactgcgacatctcagtcacctccttttaagattttctatcaaagaaggtctttcaccacctttgatacctagattctaccttataacgcaaggtaatatgcaagctataaccctagaggattttcttttcttacagaaaaagttagctatcactctttacagcctttacagctcttgtaaagctttagtcgaaaaggccacccaaacctaaagcagcaaaaggattgttactgacttcttcctgttgttccaaaagtttggcattttcatctaattcgagaaacttctcgtaaatctgagctgtcatccgagcatcctccaagctgttatgcccgtgtcccttgattccgaagaaatctgccacgctggttagcttgaggttgacaataccattcaaatccgaagcacgacggtcaaaagcctcatcaaaaacatctaaagcatattgctcttccaagtccaaaccattttccgacaaaataggtaagtccgacttaagtgcgttgtagccaataagtggagtgtcaccaacaaatgatttaaaatccgccagaacggactctagctttggtgccttggcaatcttgtcagctgtaatccccgtcaaaccattgataaaggactgcaaaggaacatccgaatagacaaaagagtcaaactgatccacttcctcatgctggtccatcttaacggccgatacttggataatatggctaaccccatccactgtgttgaactccaaatcaaaggcaatataagtttctaaattttccattttatctcctataatagttaaagctgagactgagtcccagcttctttcttattttccaaatagacgtccaaagaaaccttttttagaagcttcttcttgtttggtctggatttcttccacttgggccttggcttcgtcaacctcaaccttagcctcatcgagttccagtttaagctcttccttatccttcatagcagtcaaggtcaattgttgctgttgatcgatttgcttgtccttttcagcgatttgaacgtctttgacacgcaattgatcatccatgttagacaactgctcatccttagccttcaactgagcataaagacgggcaatctcagagtttttctcgtctacaagaatctctaacaactcacgttgctttgtttcttcatcgattggctcatcgtcaaagatggttttcttgtagatttcctccaacttaatcaagccactgcgtttaacgacagtaacccctttagcatttttttctagatcttcttctggaagttgtttgacacgattattgactgcttgacgactaacgccaaggatttcagcaatctcgctgactgtcttttcaatactcataatagcctcattttctcttgaaatgtcttactatgagaatatcacaatcactcctttctgtcaatttgactagttattctggatatctgaagggctcttttaaagtttctttttcctttcactcttcaaacaatttacttgataggaagctaagcttttggtaaactatgtgtgggtataaatgtatatagaaggaaagtctttgacttaaacaatcggtacttccaaattagctttggtcggtatcagatctgttgtatctaggaatggtgggaacaattccacaaggtttgggattttcattcttgctccaattataggtggcattcgagcaaccttggttgcaaaactgcttgatattgaagcataaatcacattatcttcaacggtttgactgttggagtttttttattgtcaatccactcgctcactaaagcctcatattgccatccgagattgaaaaaagccctaatttatgccataataaacaaaagcaaaatagaaagaatgagtcctatgaaaaacttccgtgatgatattaaggtcaatgatttagcccagcccttcttagaggcaatcgttgaacaaatgaccactgtattcgaccctgagattgagctagacatctacaaccttggtttgatttatgaaatcaacgtcgatgaaaatggtcactgctatttcctcatgaccttcaccgatactggttgtggttgtgaggagaccatgccttatgaaattgctgaaaagctaaaatcaattgacggcattaactctgtcaaggtagaaaccacttattcacctgtctggaagatgacacgtatcagtcgttatggacgtattgctcttggtatctcacctcgaagcggaaaataaaaggaaaaccgattggacatttccaaccggttttttatattgagctaacagcagatagacgatcacttgtcataatgctgccatcaaccgtctcaggacttaacatcaaaaaatcacatcgcacttatgtccggtgtgatttcttttatgttagcaaattaggctttacctgatttatccatgttccagaagtcggtaacggcaccacgagatgctgaagaaacgatgtgagcatacttaccgaggacaccacggctataaagtggtggcaactcagtttcagctttacgtttcgccaactcttcgtctgaaacgtgcatagtaatttctttagtatcttggtcaactgtaaccatatcacctgtacggaggtaggcaataggtccaccaacctgagcttcaggagcaatgtgaccaacaacgagtccgtaagtaccacctgagaaacgtccatctgtcaagagggcaaccttatccccttgacctttaccaacgatcattgatgacaatgacaacatttctggcataccaggaccacccttaggacctacaaaacgtacaacaactacgtcgccatcaacgatttcatcagaaagaacggcttcgatggcatcttcttctgagtcaaatactttagcaggaccagtaatgttacgaactttaacccctgatactttggcaaccgcaccttctggagccaagttacctttcaagataatcaatggaccatcagcacgtttaggattttcaagcggcatgatgactttttgacctggtgtcaaatcatcgaaggcctccaagttttctgcaacagttttaccagtacatgtgatacgatcaccgtgaaggaaaccattcttaagaaggtatttcataacggctggcacaccaccgacgttgtaaaggtcttggaagacatattgacctgatggtttcaagtcagccaagtgaggcacacgctcttgaaaatcgttgaaatcttcaagtgtcaaatcaacattagctgcgtgagcaatagcgagcaagtgaagtgtcgcatttgttgaaccaccaagtgccattgtgacggtgatggcatcttcaaaggcttcacgtgtcaagatatctgatggtttaagacctagttcaagcatcttaacaaccgcacgacctgcttcttcgatatctgcttttttctcagctgattcggcagggtgagatgatgatccaggaaggctcatccccattacttcaatagctgttgccattgtgttagcagtatacataccaccacaaccaccagggccagggcaggcattacattcaagctctttaacctcttcggcagtcatatcaccgtggttccatttcccgataccttcgaaaacagaaaccaagtcaatgtccttaccgttaaggttacccggtgcaatggtaccaccataggcaaaaatcgctggaatatccatgttagcaatggcaatcatagaaccaggcatgttcttatcacaaccaccgatagcaacaaaggcatcaacgttgtgaccacccatagctgcttcgattgagtcagcaatgatatcacgagatgtcaatgagaaacgcatccctggtgtccccatggcaataccatcggcaacggtaatcgtaccaaattgaactggccaagcacccgcgtctttaacaccttctttggcaatttgaccaaaaccgtgcaagtggatattacatggtgtgttctcagcccaagttgagataaccccaacaataggcttttcaaaactatcatccgtcatcccagtcgcacgaagcatggcacggttaggtgatttaaccatgctatcgtagacagatgaacggtgtttcatgttattttcagacacgatattttcctccatagttaataactattctaatttaaacttctacccctattctaacataaattgtctaaaaaaactgaccatttaccaactattctccctttttaaattatgctaaaataaaggcatgaaacattttgatactatcgttattggtggagggcctgctggcatgatggcaaccattgcctcagccttctatggccaacaaaccctcctaattgaaaaaaacaaacgtctcggaaagaagctggctggtactggtggtggacgttgtaatgttactaacaacgggactttagacgaccttctagcaggcattcctggtaatggacgtttcctctatagcgtcttttcacaatttgataaccacgatatcattgcttttttcgaggacaatggtgtcaaactcaaggttgaggatcacggacgtgtcttccctaagacagataaatcacggaccatcatccaagctctggaaaataaaattcaagaactgggtgctagtatccttaccaatacagaagttgtctccgtcaaaaaagttgatgagcaattccaagttaagtcttcagaccagacttttaccagtgataaactcatcgtcacaactggaggaaaatcttacccatcgactggttcaactggttttggacacgatattgcccgccattttaagctccatgtcactgatcttgaagctgcggaaagtccactcttaaccgactttccccacaaggctttacaggggatttctcttgacgatgtcactctgtcctatggcaaacacaaaattacccatgatcttctcttcacccattttggcctatctggaccagctgccctacgtctttccagctttgttaagggtggtgagatcgctcatctggactttcttcctaaccaaagccaagaaaatctcaagacttactttgaggaaaaccgtgagaaatctgtcaaaaacaccctcaaagcgcttgtgcctgagcgtgtcgctgaattcctagcagaagacaaggctgacagcaaggttaaacaactgcaccccaaagacttggaaagcattattagtcagcttaaggacatggaaattccaatcacaggtaaaatgtcacttgccaaatcctttgtgactaaaggtggcgttgaccttaaggaaattaatcccaagaccctagaaagtaaaaaagtccctcacctacactttgcaggagaggtccttgacatcaatgcccataccggcggttttaatatcactagcgccctctgtactggttgggtagcaggtattcaaagcccttgggattaaggagatttttcgattaacgacaacaaaaaggtcccttctgtcatagaagggattttttgtctatttctcaaaggagaggaggggattcgaacccccgagccccgttaaggactacacgctttccaagcgtgcgcactcggcctctatgcgacctctccacaacaaacgattagcctattaatggctaatcgttatttttaatcaagttttcaagagttaatctttaaactgagcctctactcgatagatgacctgacctttttctgagaacttacgctcgtattcagtcatgacgttgccttcataatcacttgcatgaaggtccaaccaaactttgttgagaaccattccatactgtgaaaagctcgccaaactgtattcgaaaagtccacgattgtctgtcttaaagtgaatctctccattttcaggcaaaatttgcttataagtatctaggaaagtcttgtaagtcaaacgacgtttctcgtggcgactcttaggccatggatctgagaaattcagatacatcatatccacttcgccatcttcaaaataattggtcaaggctgaaccatccacgcgcaagagcttgacattttcagcacccaaagccaaaaccttatccaaggcgtagctcaatacagacagctgaatatcaataccaatgtagttgatatcagggttttgttgggccataccagtaatgaaggcccctttaccagatcctacctcgatatggataggattgtcattaccaaaaagctcatgccacttacctttagcagcttctggctcaaggataacgtactgaggatggttagctaggtgttcctctgcacctttacgttttctaactcgcatgtctactttctaatatctgtgcaaggtctctctgaatttacgaagttcataaatttctcggttggcatgttccatatcacgactatcaaagaattttgaaatctgtgtcaaatatgaaaactgcccataccagtaaatcttatccatcacaaggtcgttgttcttatagccatagtatgacaaccactgtggccaatgtgccaatggaatgtaatggctgaggatctgtgccacatcatacatacgatctgttagacgtacagaatcccaatcaaccaaataaatcaatcctgaggttgtgatgacaaagttactatgacgagcatctccatgaacaattgttgcaatctctgcacgaaactctggaagatgacgtttcaaatctctaacaacatcttgaaggaagccattctcacgcaattggtaagcggcattttcctcccactcgtgtagaagatcgaaaggattttcaatatgataatccaactgcaagagttgattaaccaaatgtttagagcggtgcaaattaccaagaatttgaataatctgtttactgttcatgtcatgtttggtcaaaatacgaccatcaagccactcctgtgcactcatcatgtcaccatttcccagacgtttagcccacaagagctggggtgcaatctgttccttggcaagagctgccaagattggtgttgtattcatcttcacaaagacgcgatctccgtttgggtaggttcccatataggccttaccactatttcctttgagaggagtcaggctcaaatctttatctgttgatgtcacctaggcatctcctttttctttagtcattcgtttctattttaacttatttaataggtgttagtcaatcatcttcttaagcttggctggtaggtaaacaaggctcaaaactagcatcattccaaccaaaatcagactaaacttaaggtcgaagagacaaatagcctgtaccatagtcagtacaagtacaatctgtgtaatcaagcgtttaagattgttcacctgcatgtcttttccaaccggcataaggttagccattctctgataagcaaagtgcgatttaagtgctgtgagctggaagagtaagaggtagtcaaaaacaaccacaagcaccatagccaaccatttttcaggaaccaaaaagataactagaagtgttagggcaaacaggcgtaaactaagggcaaagtaatctccagaacgcaagaaagctcttaggtaaagattgtaccaggtatgttccttgtctttctttgtacgtttgagaatagcatccaaataagcacggcgtttaacactcgatgtaatccccttaacattggtaaagagtgaaaagaacttcagaatcgattgttgacgcttattttccgctgcaatagcctcagtccaattcagtcctgactgcttataataaggttgggactttttctggaaaataaagtacttaagaatagccatagccacagctacaaggataactccccaaactggaagccccaaggctaaaaagaggggaataaccaaaataaaaatcaggctttgtacgattacccaaaatctaaaagcacgccccgttgccttcttaacatggtctagcacctcttcttccttaaccaaaaggtagtgcttgtccgcaggttctagataagtcgcaatattcccccagaaaggcaatagaagacaaagcacaagcaaaccaagaatgattgcccacggattttttggaaaatgtcgaagcaactggctatactgaaccaagacaaagcctagcagaaagagaagaaccaagataaaatgatcattaaaaacgtagcgactatacttagcacagcgggcattgaatcgcttgctacgctccttaaatagcttagctatcatgacaattctcccttagttaactgcatgtagatatcgttaagactagcactatcgtcgccaaaagtctgacggagctcctcgagagtcccctgggccaagacctgtccatggtgcaaaatcacaaaacggtcacacattttctcagccgaatccaaaacgtgagtcgacatgagaatcgccttaccattcgttttttcctcagccaaaagctcaatcaagtccgaaatcgccaagggatccaagcctaggaagggctcatcaacaatgaaaagacttggaccaacaataaaggcacagataatcataaccttctgcttcattccctttgaaaactgagtcgggaaccagtccaatttttcatctaagcgaaagagtttgaggtacttgtccgcacgtgccatcccctcagtcacatcaagcccataggccatcaacaccgtttccaaatgttcacgaagcgtcaactcttcatagagacttggcgtttcaggaatatagccaatcttctgacgatagctagctggatcttgttgaatagttaacccatcaatggcaatctgtcccccataaggtgttaagagaccaataatctcgttaattgttgttgatttcccagcaccattaagaccaatgagaccaaccaattcaccatcagccacctcaaaagtcacatcttttaggacgggaatattagcgtaaccacccgtcaccttttctaatttaagcattatcttttctctctttggtatgatataatctattataacaaaaactcatggaaaggtcgttattatggataattgtattttctgtaaaattatatctggagaaatcccttcatcaaaagtctacgaggacgacaaggttctagccttcctcgatatttcacaagctacaaaaggacataccttggttattcctaaagagcacgttcgtaacatcttagaaatgtctgctgagaccgctgagactgtctttagccgtgtccctaaaattgcccgtgccgtgcaaaaagcaactggagcaatcggcatgaatatccttaataacaacgaagaagttgctggacaaaccgtcttccacgctcatattcatctcgttcctcgttacggtgcagacgatggtatccacatgggatttgacgaacacgaaccagacttcgctgccctggccgaccttgctgacagcatcgctaaagaggtaacagaatgaaaatcggacgctttctagctcttggaactcttgcctacggtgcctactacgcttacacacgacgtgaagacatcaaagaggaaatcctagacctcaaccaatcacgagaaaatatctctcacgatctggacaatatcaaacgcaaccttgacatcatcaaggaacaaaacctagttctcgctgacatcaaacaagaccttaactataaaacacgcgtcttcaagaaagacctcgaaccccgactcaacatcatccaggaacgcttgcaaaagtatcagggtgatgataaagaataaaggtaagtagcctgtgctacttacctttttgtgttgctttccactttttaaattcttgatattctctaaagctctcttcatcagacaactcatgttcttcatctgattcataagatggcgagacaaactcttcaaaatcgtctaaaaatccgttattacgattttttcgacttttcctccaagttctaccttgttttatagcagtgtctgaattgattttattatttattacatttcctgctatcgctcctaaaccgagccattttgctatattacctaatttattgattacctctgaaattgtagcaaaaatcatgataattaccacgaatgccataaagaaaaacattggccaaaataaatccattttacactccttgaaataattttctcatattcatctattaaagaaattttttcaggctcgctagatacaatgaaccacctattattcctaagattccgccaatccatcctaagaaaggaataagagaaatcgctcctccaacaatcaagagtacactaggagcagttcctaccggagtatctcctttataatagacagcaccaactattccaagtactagtagggctaactttacaagatatacaaataaagtcattaatccagtcgcaacctctgagcccgaagatgctacacctaaaataaaccagattccaaaaagaagaaagattcctccgattagtcctactactccatttgtgacagctaatgtttttgttttcatttgttctccttaattatattattgaatttgggttgaaatattatctgtatattctttcaacccattacggtaatttttcaagaattcaactagactatctttaccaacaatcttagtatttcccatcggaccgtattctttcttctgttcttccaaagactttaatgattcttgcttcatttgctcaattgtatttgcgtcatcaagtactgtaccagcaacagcattttgataattcgttagatattcatcaacaattttcgaatacatcgttagatagtcgttataggttgaaatactctcaattgtggtatcagatgtgtcctgagggttaaaattacttgaacttacagaacctgaagaacttgacgttgttgaagaacttgaagatttacttgtaactcttcctgaaatattttttgcagtatttattatgtttttactggccgaacaacctgttagtgctatagatagtaaaattactgcaaaagtaaataaacaatttttctttttcataagaattcctcacctaaatttaattttctgtaaacattatatatatatatatatatacgttgtcaacgttttcttgaaaatagaatctaaatttaagttagtttttagattattataatttaaataattttatctcattttatatttaagaataaatataaaagtcacagctatacccaaaacaagactttccgctgtgctaaaggtgagagaagcaccattgcttctctcactcggaagatttgagacttaggctcaaatcttaggaatggaattccgttaggaagtcgcttccgtccctagcacccaaggaaagtcttaaataaaaaagaaaaaacagagatgtctactaacatctctgcttcataataggattaggaggttttatactatttatttagcatctttttctttgataaccaagacaccatcttccatatcagcttctaggtgtttagcatcaaggttatccaagtggaagtctgtgactttgtcacggatttgttgttcaaccacacgacggagtggacgaacacccatgacttcgtcgtagccttcttcagtcatgtattctttagcagcttcgctaactgccaagtcaatgtctttcttagaaagcgtcttgttaacttcaaccaacataaggtctacaatcttagaaagatcttctttgctcaagtgtgagaattcgatgacagcattgaaacggttaaggaattctggacggaagtaaggtttcaaacgatccataagttctggtttatcagcatcttctgtcaagttagcttcataaccaaagcctgcgtttgaagttgcgataatcacagtattcttgaagtttacagtgttaccttgaccatctgtcaaacgaccatcgtccaaaacttggaggagaagggtgatgacttgagggtcagccttttcaatttcgtcgagaaggacgattgagtatgggttacggcgaacacgttctgtcaaagtattgctattgtcatcataaccaacataaccagctgttgtaccaatcaatttagaaacggctgtgcggtcgctgtattctgacatgtccaaacggataatggcatctttagtaccgaacatatcaagagccaattgtttagccaactcagttttaccaacaccagtaggtcctacaaagaggaagctaccgattggacggttaccttcgtcaaatcctgcacggttacgacggatggcacgtgccactgcttcaacagctttatcttgaccgataaccttggtttgcaaacggtgacccatgtctttcagacgttcaatatcagttgctcccatttgcgatactgggataccagtcatacgttctacagattcagccacatcgttaacagttgcagtgactttaaggtcttctgtatggttagcaattttcttttcaagttcttcaatacgaaccttagcgtttagagctgcttcgtagtcttctttggcagctgcagcttcttgtttagctttttcagcttcaatttcatgttcaacagcattcacatcagtcactgggtgttgagcagccaagtgagcagctgttacatcgacaaggtcgatagccttatctggcaagctacgttgtggaatgtattgtacagagaaatctaccgctgctttcaaaacatcatctggcaagataacattgtggtgtttttcataaagatcacggataccttgaagaatcttgaaggtatcttcagcagaaggagcattgaccttaacttcgttaaaacgacgagctagggcagcgttcttcaagatagtgttacggtattcatcctgagttgttgcaccaatcactgtcaattcaccacgtgaaagagctggtttcaagatatcagcaagacctttagatccttgaccatcaccagtgcttccggcaccaagaatttggtggatttcatcgaagaagaggataatgtttccagcttctttaacttcgtttaccaagttttgaatgttttcttcaaagctaccacggtattgagtaccagcttcaagtccagaaatatcaattgagatgatttccttgttcttgatagcagctgggacatcaccattgacgatggcttgagccaaaccttcaactacggctgttttaccaacgccagcatccccgacaaggactgggttattcttggtacgacgagccaagatttcgcaagcttcttggatttctttgttacgtccgataacaggatccaatttaccttcgcgagcttcttcagtcaagttacgaccaagtttagcaaggataccgtcttgtttaggtcctttaccttgttgttgagttgggttcactgcttcaccttcattaccaggcaattgacctgtttgacggtagatagcaaattcttcaggtgtcacttcacgaccgttaatcatgtagcgacggttttctgaacggtaaccacccatgttacccatcaattgattgaaaagatcgtccatattgttaaagttgttgttcatataattacctcgttttgtgttttcttgtgaaattttttaagtgttattttttatgttaatgtgtaagttttgacttttactgaccaaaaccctaaaaatttttagtagctttaactactcttctaataatttcaggttttgctcttggtaggagactgagaactttctcagtcttaaataaattgtcatttagcataagagccaccttctttctgtgaatctctcaatatagctaacttccaagcccctttcgaaactataaatagtttttttagaaagaaacttgaatatcaaggaatcctttttccttatagttttatcatatacctttcatttgatcaggtcaagaatttgattttgacttttactgacctttcagatgaaaatttttgcagactagctgcaatccttttttattggtatatgggctatttacataaccttcataaggatttcatttccttatgtttatattgtacaacattggtcagtaatagtcaatagtttttttgacctttgttatcatttttttgtagccaagctataattacctttttacaataatctagccaatgctacaaaacttataaggaagataaatccttatgtaactatcatacactattagtcagtaaaggtcaatagttttgtttgatcttttttgacctttttgagaatatttcccgaaaagtaaaaaagcctaccaagggtagacctaataatgatctttaaaagatagaaaagcgacgctcttaccatcaatcatataaatcaaacgattttcagcatcaattcgtcgagaccaagctccttgaaagtcatactttaagggttctggcttaccaatacctgaaaaaggatcccgctgaatatctttaatcagcttattgattcgcttaagtgtcttcctatcctgattttgccaataacaataatctgtccatgcatcttcagtaaaagtgagtaacattttctactcctttattgcatgttcttgagtctctccagcacgtacctgagccattcctcttaaaaccttgtctgatagttctttattttgaacaatacgcaatgtttcttgaatgctatcccattcactctttgagaccactacaatatcttcatcaggatttttattgactacagctagaggttcaaactcatcattaaccttcttcatataatcctttaaatgatttcgaaacgttgaatagacgactgcttccattagcatacctcattttcctcttttcttttattatataccaaaagaccaaacttgtcaggaacttgtacaaatttatcctttctattacatttattcgcaaaagaagtaaaaaagcctaccaagggtagaccttctataaaactattttactctatgcggtatgcgtccgaagttttgttcggaaagctcgggattacctaactgataaacattatccgcttgttgtgtaagcatatcccaaggctcccttccaatccgagccactatatccacagactttttcacagatttgagatgagcctgccctttttgagaaaatccaagcacatgaatggattcaggcaaaggattttccacagctccaactagaatataggtcaaaatacgacgtacccgtgcttttgtatagcgtttggtcgccaccttatccactagttcctccacagaagaaacctcacgaatagcagattttaaacgactggcaatctcttcatttacctggaaaacactagtcaaatcgggatttgtaaggatctgatataccagtaattggaaataattatcccaagagacctgtggagaagtctgaaaaagtttgctattgggcatgaacttatccacaaaatcactatcttgcttgtggcgacgtagactggtcgctgaggcgaaagatactttcttgtctgaggaatgatagccagctccttgtctctgaataggagtcaacttaatacccttaccagcacaagctttggcataggctaagcctaggatatggttgggtgtgttgccagtaaagtccacaccagcaaacttttcccacattttttgagtcttctgtggataagacaaatcactagccaaactttccacaaaggcttccatttcctcggacttttcagcatagacatctgctatcgcctggtagtctaggacttcttccgtgccaaaagtaaggctttcaattcccagtcgggacaagatatcgacggttccagcagcaaaataatcggcagactgaactgccgtaaaaaaaggcaactcaaccacgaggtcagctccattttccaaagccatctgagccctagtccacttatccacaatagctggctcacctcgctgaacaaagttcccagacatggcaacgatttttacaccttcagcctgatccaagagatacttgtggccgttatgaaaaggattgaactcagcaataatacctgtaactgtcatagtctcttacttttgggccacaaagaaccaacgtgtactagtttcagtcggctccttatcctcgaaatcagcgtaaagtttgaaggatttgaagccagcctgctccaacaagatatcataagtcaaaacctcataggtacgctcctcatggacctcatcatgtcggctaaagcttccatcttcctcttggacaaagaaggtcaattcatgaacaatagaatgtggtgccgcatcctcataggtatcccaaagcatagcaaaatcttctgcattttcatgataagaatagccagggaaaacctcatccgtctgataggttgagtgcacatcaaagatgaagacaccgtcttcattaagggcattgtaaacctccttgaagacgtccccaacctcaacttcatcttgcatatagcagattgaatccgagtaacaggtcacaaagtcatacttgcccgcttgcgataaatccaacatgttgccttcaataaagtcaattttctgtttggcagaagaggcacgcttctcagcaatcttcaacatatcagcactcaaatcgagtccagtcacatcaaaaccagcttgagaaaagcgtacagactgaattccagttccacaagccaattcaagcaatttctttttatccttagtctttggcaaatgacgaagggaaaaatccgtccacaaatcgtaaagactatcatccataacagcgtcgtataccgccgcgaaagtttcataagtagccataaatcaagatacaaagagcgtcaaaagcacagagaaaatagaaagctttcttctgtatcacctgacacaaagaaagtttatctttttctcactgcttttagctcgtgttcagttaacaaaccaactaaacacaaggctctacccttcctattaaatctttagtttaagcaacaaaacccagttgtcgccaactgagttcaatttttatgccaaataagctgacacatccaccattggtgcttcgtgccagagtttttcaaggttatagtgagcacgttcatcttctgtaaagatgtggacaacgatgtcgttaagatccaaaagaatccaaccacccttgttgtcaccttccatgtggctagcatcaaggccagcttctttcactttctcacggatggtgtctgcaatagcttccaactgacggctattcattgcactcaaaataacaaagtaatctgttaggcttgtaaggccgtacaaatcaagggcaacaatgtcttcagctcgcttttcatcagcggctttgacaaccaattcaagtaattcttctttagtcaatgatattctccagtaattgttattaatcttttaagtaatgcacaaaagcattataagtttccaaggtttgcgggaaaatcggcaaggcctgatgagccaagtgttctacggtatgaactgtctcaaaagcaacggccttatccaaggattgctctgctacttgtctagcttcctctactaaagggaaattacggttatgctcaatataatcagccacatagacaatcttatccagggttgacatttcatggcttccgaccgtatggatttcaatactgcgtagaatttcggaatcagtcaatcccaaatcttcttggattttataaatcccaaccatgccatgccagacattgtttccccattgtttcaattcaggatcaagattatatttatcaataagccccaagaattcctgatctggaagttccttggcataatcatgaagcaaaccagccaggccggctttttcagtatcatatccgtacttttcagcaagagcaatagcagctcgctcaacacccagaacatgattgaagcgtttaggactcatgaccgctcgaatcttttcaagaagttcttcacgagaatagtctaggtatttttcataggtcatttatagagccccgctttcttgatgtaggcaagtacagactgtggcaccataaagttaggtgtgcgatccttcttaatgtaggctctaactgcactcgaactaatatccataaggggcacatccacccaaataactgggtaagacgttccagccttatacttaggacgctgaacaccaacaaattgtaccatctcgataagttcatcaatacgatgccacttaggtaggtattcgaccatatccgctccaataataaagtaataatccgtatcaggattcgcttccgtcaagagcttcatggtgtcataagtatagctgattcccttacgttccaactcaatggtttcgatgtccaatccttcgataccgttaatagccaacataagcatattaagacggtgtttttcatcaatggtctcttttttatcgacatgaggtggctcatattcaggcatgagaagaacttcatcgagacctaactgctgacgcacctggtcagcaacaaccaagtgggcattatgaacaggattgaagtttccacctaatattcccacttgcttacggcctgtatctttgatttcttcctctagttgaacctttgtaaatggggttacgagatctagtgccatgtacgcctcctctttctcaagcattatacaactgacttaaggctagctttaatgcttcaaaagtgttcctataccttagtttttccttcaccaagcaaagtcagcaactatttttggatagccttgacctttggtgacaacttgcgattttcttttttagctgattctttatagagaatcaagatacgtccaatcttaaggactgtatcacagccaatttcttcttccaagatttcggcaacttcatggatatcttccatggtattttggagtagggttactttgatcaattcacgagcatcaagggcgttacgaacgctagttttgatgtggtcgttaagaccgtttttcccgatttgtacaataggtttgagagtgtgtgcttccgatttgaggaaggcacgttgttttgatgttaatgacatgtttattccttttaatttttttgctgtttttcttaggtgatacggtgctagcaaaccttcgatttcatagctaatttttgagcctaaggtctcaaaaattccgaatccaagtaacattttatgttacttggattactatcacagcgaaaaacacatcgtttgctcatgacctaaatctaggcaaacttcatgttcattgaaaagacgctttttatgcttttaactactttattaagtttaaataatcgcttttcgtacgacgacgccaacaccttctggtgcccaggcagcaacgatggttggttggtcagcttttccttggacacgaatccaacctaatcccgagaagacaatgtctgtcttatctttgacagtaaattcgtgacgaacaagttttggaaaatcagccagatcctttggtccaggtggcatgagaagacttccaacatgcttatcatagaaggcatctgcgccttcaagcttggtgcgatgaagcttcaagttattatcaaagaaggctgtaaaaccttgcttattcccatcaataaagtcaaaacgtccaagaccgcctaggaataggctttgtcctgcatttaactggtaagtttttggcttaatttccttcttaggactaacgtacttgagatccttcgctgacagatagtgtgccatctggtgtcggtgaataattcctggtgtatcaaaaatatagctaccgtcatccaaaggaatttcaatcttatcaagggtcgttcctgggaaacgagatgtcgtgataatatctttatcacctgtaatttccttgataatcgcattaattaaggttgatttaccaacattcgtcacaccgacaacatagacatcacgacccttacggagtttttcaatacgctgaatcaactctttaatggcgtgatgattttgggcagacgtcaacatgacatccacgggacgcatgccttcttcatgggcacgttctgtcaaccattgagttaccttaccatctttaacagatttaggtaggatatcctttttatttccgaccaagagcacatcattaccagaaacaaagcgtgacaagcctggaatgattgatccattaaaatcgaaaatatcaacaacattgacaacgagggcatcactgtctccaacttcatgaagcaattttaaaaattcatcatctgtgatgtggacatccacaatttcattgtagtgacgaaggcgaaaacaacgttgacaatacaactcgcctgtttcttcagctttttttatcgagctagcgggtgtgtaaccagccttttctttatcttctgtttgaatttgggctccacagccaatacaaaataattcttccattaaattcctttgttaaaggtcattggaccatatgctttttcaatctttttccacatgcgacgctcacgccaacgattaaacttggttacccaagcatctgattgcaccaagggcttaaccaaaatcgagcgaataccagctcggtggctagctctgatgtcagtcatgagctgatctccaaccataacaacctcgtcacggttaaagtggtaacgctcaatcgcttcattaatccctttcgtaaaaggtttcatggcacgactcacgaaatccacatggaaattggcaaccgcacgttcaacacgttcatgtttgttgttagagaccacaaccactggaatgtcagcctctgtcatctcatctaaccaagcacgtagctcaggagtcccatcagggttgttccaagcaatcaaggtattatccaaatcgaccaagacagcacgaataccgtgttcacgtagctggtcaggtttcaaatcataaacagcctccaccataaaatggggcctgtaatcgtctatactcattttctctccaaaatgttagtttacctcttattttaccatatttttaaggtttatgtgtgggacttaagtcctattttttaagaacatctttgacacaacggtatcgaaaaagagccacaatcacttgggctctatctttatctttgaattttctcttgttttttaagggctactaaatccttaagtgaaatgaggataacggcaagaacaattaaaatcattccaagcacatcaatggcaaagaagtggtcacccatgattaagaccgttaaaatgaccgatgccacaggttctaccgaggccagtagacttccttttacagcgccaaccatggtcgtccccttaaggaaaacggtgtaggcaaagactgtcccgatgaagaccaacccaaagagtgctaaaagatttccaccagtcaagggtaactcatacttccaggcttggatagcaattggaaaaatcagaccaccgagtaacattcctagaccgatgacaatcagactgccccacttttcaatagctttagcaggcaataagatataaagcgcataggtgagcgccgaaaagaggccccagaacaagccaatcggtgtgatagccaactctgtcacctgaccatgcgtggcgatgataaaggttcccgcaatagccatgataatcgccactaactctgagaccgttggaaatctgcggttcttagcacacacaaaagccagaataaggactggcgtgacatattgtaagactgtcgcagttccagcgttggtgtaatgaatagcactgagataggcatactgattcaagaccagaccaaagagagcaaataaggcgatacttactaaggttttcctatctttaatggcttgtactaatttgtctcgatgcctaaaaaagaccgaagccgttagtaaagtaccagctagaatcaaacgtaaactcgtcaaaagattgacattaaccccatgagccatcaggtattgaccagaaacccctgagactccccaggcaatcccagcagttatgaccatcagactaccttttaattgtttagacatgtgttttcctcgattatgataatgcttaattattatatcacagggagttgccagccaggcgataacttcagaaaaattaaactgtttttcttgaagaattttccagccaccaaccgacaatccaaccaaggactaaaagataattctcaaaagctccaacagcattaacagagtgatgatattgaagatagctaaggaaatgattggttccaatacctagacctcccagaatcaaagcaatcagaactgctctcagataaaaccaatcgtactttaggttaacggcaaggaggatgaccagaaccgccacattccaaataccaatctccctctgccaaccgatagaaataccatatcccgaatgacttcccatataggtgggaaagaatagctgaaaaataatggcaccagtcatggcgatgatgactaggataaataagactcttaagaatttgttcattggtttgctcctgaaatcttctataaaaatattcccaactagtctaacacaaatattgcaaagaaaaaaccaacctttcggctggttctttatctattactcttctttcaacttagccaattcttgggcaagtaacttgagggctacttgtgggttggcttggcctttggttgctttcatgaggaagcctgtgaaggccttgtcagcgttacgtttacctgacttgaagtcggctacggctgcttcattgtctgcgaagacttggtggatgattgggatcaagacttcagggtctgaaatctgtaccaatccagctttttcgacgtattcacgcgcgccaccaccgtttttcgccaaatgaacgaagactttcttggcaatcttagatgaaatggttccatcttcgatgatggcaatcatttcgaccaagttttctggtgtcaattgaatttcttccagcgtcttgccttctgcgttcaagaattgtgcgacttcaccttggagccagttagacacttgtttggcatcgccaccaagggctacggctgcttcaaagaagtcagaagtaactttcgtcgctgtcaattggttggcatcatagtcagacaagccaagctctgccacgtagcgagcacgacggtcttttggaaactctggcaactctgtgcgcatttcctcgatccactcatctgagatttcaaacaatggaaggtctggttctgggaagtaacggtaatccgctgctccttctttgacacgcataagaatggtgctcttattcgcttcatcataacggcgtgtttcttgacgaatgaccccacctgatcgcaagattttcgcttggcgctgtacttcgtattcaagacctttacggacgtttgagaaggagttcaagtttttcaactccgtcttggtaccgaattcctcttggccgtatggacgaagggaaatgttggcatccacccgcatcgatccttcttccatcttgacgtctgaaataccagtgtactggatgacttctttcaaagctgtcaaataagcgtaggcttcttcaggagaacgcatatctgcttcagatacgatttcaatcaatggaaccccttgacggttgaggtctacgtaagagaatccatctgttccatgggtgttcttaccagcatcttcttccaagtgggcacgttcaatcccgattttcttagttgagccgtcttccaattgtacttcaatccaaccgttgtaaccgattggctcgtcaaattgcgaaatttggtaggcctttggattatcagggtagaaatagttcttacggtcaaagtgcatgtgctggtggatatccatattcagcgccaaagcagccttgataccagcatccacaacacccttgttcaagacaggaagcacacctgggaaagaccagtcaatcacattggtattggcattttgctcgttcccaaagtgagcagaggttggtgagaaaatttttgagtttgtattcaattcaacgtggacttcaagtccgatgactgtttcaaagttcattaattgtcacctccgaaaataaggggttgttgcttgtggtaatccgttgttgcttcaaaggcagctgcagcttggtagatggtttcttcagaatacttcggaccgatcaactgcaacccaactggaagaccttgcgcaaaacctgcaggaatcgaaattcctggaagacctgccaagttgactggaatggtcaagaggtccgccaagtacatggcaaccggattatggttgagcgaatccaaatcaaaggctacacttggagctgttggaccaaggataaggtcgtaatccgcaaagactttttcgaagtcttggataatgagggtacgaacttgaccagctttcttgtagtaagcatcgtagtaaccagatgacaaactaaaggtaccaagcatgatacggcgtttgacctcatcaccaaagccttgactacgagtgttcacatagatgtcatccaagtttttagcatcgtctgcacggaaaccatagcgaataccgtcgaaacgttgcaagtttgaagaagcttcagatgaagcgatgatgtagtaaacggcaaccccgtatttagagtgtggaaggctaacttcttcgacagttgctcccaatttttcaaagtgtttagccgcattgaggatggtttctttgacttctgggtcaattccttcaccgaggtattccttaggaagggcaatcttcatgcctttaatgtcttgaccaatcttagaagtaaagtctgctacacgaacaggtgcagaagttgaatccttggcatcttcgctggcaatgacattaagcaattgggcattttccttaaccgttggtgagaaagtaccaatttggtcaagtgagctaccaaaggcaatgagaccaaaacgtgaaaccgttccataagttggtttgagacctacgattccgttgaaggcagctggttggcggatagaaccacctgtatctgaaccaagtgacaagcggacttgtcctgaagcgacagaagctgctgaaccactagaagatccaccaggaaccttactgtggtcccaagcgtttttagtcgcaccatagtatgaagtttcaccagatccacccatggcgaactcgtccatattggtcttcccgatgacaatcatatctttggctttagcattggcaacagctgtcgcatcaaagattggctcgtagttatagagcatttttgaagccgcagtggtcaagatgccatctgttgagatattgtctttgacagcgagtggaatccctgacaggaggttgtctgcatcgattcctttttcatcaatggccctagcttgagcgagggcagcttcttcggccaccgttacaaaggcattgactgcttcttcacgcgccttgatatcgtcaagcgtcgcttgtgtcaattccgttgccgagatttccttagagacaaggaggtcgtgcaactcttcaatggttttattgttgaatgacattaggcatctcctccatcttctaggatagctggtaccttgatgtaatagttatctttttcaggtacgtttttaaacaagcggtcacggtcagtccctttttcagcaacatccggacgtaatacggtcttgcggtcagccatggtcgttgttggggcaacacctgttgtgtccacttcttccaacaattccaccatgtcgacaattttagacaaggttgtcgcaaactcagctgtctcttctggagagaatttcaattttgaaagattggcaacgtgggttacctcttcttgcgtaattttcatcttgcttcctttcgtgaaatgatgatttttcaataccttctattttaccataatttagcctattttgcttggaggataaaaaaactgtagtaacttttttgtcactacagtttacagagatagagcttttttaaaacacttatcgtatggctatcaagagctttctccaagcctctagaatttcaggtttcagatactgttttgccaggtcgtatgagacttggtgcatagactcaagatcactctctaaggcaaatagaatcttgtcagccatctgagaaacaagcaggtcctcatccatagtctcgccataaggaaccagatagccattctcaccatctttgatgaaggttggattgccataacgggcatcaaaaccaaccagggctaaacctgctcctaccgcttccatcagagtcaaaccaaaggtctcccactgagaggtagtgacataaagttcatactgtgggtagacatcacgtaaatccgcatgacctctaagttggatgaagtcacctgccccgagagtatcaatcaaatcttgtagattctcttgctccccacctttaccatagatgtcaaagcgaaggtttggctctttttgatgggcaagggcaacggctcttatagccaaatccaagcgtttacgtgggtccaatcgcgaagccgtcatcaaactaagaggcttcctttgctcctctggaaaactaagcttatccaaatgtcctactgctagggcataaatagcagcgtctgtgacaccttgcttttgcagagtattctctaaaacagccttttgtgcctcagtagctgtgataaagaagtcaaagcgttgggcgtacttaaagatgtaataatactcatagtagaggtccccattttcaaactcatgctctgaatgaaaaacaaagcctagctttgcaggtgaatccagttcataaatcggtcgcataaactccatcaaggaagccctatccagcaacaaggtatccgcagctgtcaaaggaagtcttgctagaaaacgacgcatgacctctgtcttggtcactaaaatctcagtgcctagcctatataaccaactggctccttgcttaagttcttcaaaggcgatgcgaccatctttattgtgataacttctcctgatgataatgcctttttcaaagtattctgtaaccaatttacttgttccataccactcacgcttcaatagcataccattgacgtggtagtctacataccgcacactacctttttggtagggatccatcttgaagactaaagaagtaccatcagaacaggtataaacagagtctgtttcgctttggcttctcaaatctagacgtgtcaacttaaatttttgctgcaaggcccccactgtcaaagatggaatatgactgtcctgatctgtaaagctaagataggcatggaggagttcctcgtagcaatgccccaaagaaagataataatctaatttatagggttgcggccaggtcgtaaagacaaacttagcaggctcctttaattcacgtagcatcaaagctctagacgcctgggccacatccacaccattgggctcatagcccaccaataggttaaaggtgtaaatcgtcatctttttccccctccaatctagtaaagaaagctaagatttcttccctatcggcgagtttcaaaacctctttctgactttcaagaaccttagggtaaaactctgcttgctgtatgagttgtcggaatccctgttctagttcctctaaggaagtataaaccgttggtaagtccttatagtagtgacgatgaaccgttgattctaagccaaaaagcaactgtccattttcaatcgcatccaaagttacatcagacacttcgcttccataattcaagtctaaataaatgaaacaattcctcagtagatcttgatatttcccctgacgaatccctgggtaaagatggacatttctcttatctttgagacaagtcaattttggccccatactagtttgggctccgatatgaaagtcaatatccggaaaagcatcaaccagatcatctaggccctcaatattttcagaagcagtcatcaccatggcttgaggcacaaaagtctgagaaccgtcttgttctgcaccagctaaataaatcatgcctgacttacgttcctcttggggataataattagtaaccaaaacatgattcacttgattttgaataaactcaagaccatcatgagtgtcggagcaataaaccagacgattaacattcaagctctgcaatgtcgggattagattggaatccatacagatgacagcttcgtctgacttgaggacctgagccaaaacatacctggtcaattcttccctacccgagaaaattctatctcttccttcagacccctgatcaatcaagtacccatcttgaatatagtggagcaagacctcttcttgattacgattaaagtaaatatccataagaccttgcccctgatcatccagaagacgctgtttggtccgccaaccatagcgattatagtcatcaatcgcaaggactttttccccttgtccaaaccattggacttgtttgaccgtgcgttctttaagattttcacgaaaaatgatactggcacgacggtcttgaccatcaaaaatataggttgtaatccctaaagtccacaactcccaataaaggggaacagacaaatcattaaagaagagaggtttgccttgataatcttcctcagaggaataaataaatgacgatgctaaactaatagtattttcatcaacatcggtttcgaaattcgtgtaaaagacacgagactgaataccaaaggaatctagtaatcttcttagtttttcggttacttgactgggttcttgtgcaataattagcatacttatcctttctgactgctttaagcaataaatagcctaaccctcgacctttattgttccaaaaatctcaagttaacctgcgccgtcttataggtctcagtatcttgaagattagcttcttccattttttcaattgcccgcttcagacgtgtcttataaatataacggtgccaggtcaaatcatagcccaacatacctagtaaagctagtttttcattcttggcttccatctcatctaagacacgtttctcagtccagacctgcgacagcgtatccttacgacccactcggtaccagtagatacatttttcagtatgaaccacacgattggcctttaacaagagtttgtacataaggaaattatcttcgacattcttcccaacaggaaaacgaaggtcctcaaataaggagattttgtagagtttcatcatagcacatgcccaggccatatctcttgtctcttggatggcatcctgatctataatgtctctcccctcataaagggtttcagaataatcgttctccgttaccttaatcaaaaacttactggtactctcgttgaacaagttataattggcaatagaaacatctgcctcatacttcttaagctgagtgtacaaggtctccacataatcctctgttacccaatcatctgggtctacaaaagtgatgtaatcacctgtggctagatcaattcctgtatttcgggctgcagataggccaccattaacttgtcgcacatagcgaatacgcgaatctcgcttgaaaaattccttgcaaatctcctctgacttatcaggagaaccatcattaacaagaatgatttcaagatttggataagtctgattcactatcgtttccaaacactgctttaaataagcttccacattataaatgggaataacaatactaactacttctttattttccatggtctatctctcaatcgtatctatatattctcgaactgcctctaccatttggtctacttggtcattcttgaacacttgatttttcccagtttggtcgtgatttgttccttcaaaagagaaaatcggaagccccaactgatgaatcgtttctgtgatatgatcaacctcgtcaaatgggttgatatccatatagaaatctattttttccaagacctttcgactggtcaagggatcaaaggatggatagagaataaggtttggatactgctccaacttcaccaaattaaacccaaaatgagaatgagccaaaacatgaaaagctacatccggaagagcctgcagcaaatgttccaattcaaagatgtctgcagtattagtataaatcgccgtatggtaaggaaaatcacctaccatatcgctaaagctaatctttaaggatggctttctcaataagatttcttcccaagacagggcataataaaaccaccaaatatccctgaaacgattgaagcgtttggacgtccaaggcttattgtgggaagtataatgaataaccgctggtacccctttaaaagcatcataccattccaaatctccataaccatactggtccttatcagaacccacttggagattataggtccatgggagttgataccaagcatccttgaaataaagattcaagattccttgatccccataaacattttgatgacgctcttttgtcaagtcaaaaagagactctgtcaccttgtgttgtcgccaccaatcggtatcaataaccatcaagccagcgttaaaaccatctgtcgtcgtcggacggtccaccaccgctccaataccaaatccgccaagatccacttcaaaaagtggtgacaaatcctgcgtaaaaatcatatcgcaatccaaatagagaacgcgatcttcttgaacaaactcaggaattgtataacggaaaaaagtcgcataatgaatatgcgtacttggaagcgaaaattgtttaaagctttcggcagacacacgacaattgagaatttcagaatcaatagcctctagacgacgattcatcagcgtaaaccattctgttggtaaattctcatttagcacataaattttccactgccctttatgtgcacaaaaagattttagagccacctctaacttttccatataggatagctctgctacaaatacaactgattttttccccatgttttcttcctctcaaactctaataagaatatcattttttagaaaacattacaatttctatcccttacaaaaaaagccaaccctaaggctgactttaattggagatcaattttcttttagtgttcgttaaacgcgtaaaatagaattcagactagcacgtggcttaaaacagcgaacatctctcaactcatagactattctacagaggcaccgttacttgcgataacttctttgtaccagttaaatgatttcttcttagagcgtttaaggctaccattaccatcgttgtcacgatccacatagatgaaaccataacgtttcttcatttcaccagttccagcagaaacaaggtcgatacaaccccatgttgtgtagccccaaagctctacaccatcttcattgatagcatcacgcatggccttgatgtgggctgccaagtagtcgatacgataatcatcttcgacataaccattttcatctggtgtatccacagcaccgagaccattttcaacaataaacatcggtttttggtaacgatcccaaatggcgttaagggtaatacgaagacctagtgggtcaatttgccaaccccattctgaagcttccaaatatggatttttaatagaggcaaagatatttccagcggtcttttcattaacttctggatcacctgaagccacacgacttgcatagtaagagaaagaaataaaatcaacagtatgctctttaagaagggccaaatcttcttcagtcatctcaatctcaatgccatcacgttcccactgcttcttagcataatttggatactctccacgagcctgaacatcaataaagaaatagctactacgatcttcttgcatggctgcccagtaatcacgtgggtgggctgtatttggataatattgacctgctgccaacatacaaccaaccttattttcaggatcaatctcatgggccaacttcgtcgccatagctgaagctaccaactcatggtgagctgcttggtatttaacctgttcctcattctcaccctcttcaaagcagagtcctgctcccataaatggtgcatggagaatcatattgatttcattgaatgtgagccagtacttaaccaaacctttataacgtgtgaaaagggtacggcaaagattttcatagaaaccaagcatcttacgattacgccatcccccatactcggtaatcaagtgcatgggacaatcaaagtgtgtaatcgttaccaaaggttcaataccatacttgtgacattctttgaagaggtcctcgtaaaaggcaagcccagcttcatttggctcagcttcatcacccttaggaaaaatacgtgaccaagcaatggaaagacgataggtcttaaagcccatttcaccaaaaagagcaatatcttccttgtaacgatgatacatgtcgatactttccttagctggataaaaatagccatcctcaaaatcaaacatcttacgacgtccagtgataattgaaaggcgatcctcaccaattggcaccacgtcaacattggctaaaccacgtccatcagcatcataggccccctcacattggttggctgctgtcgctccaccccataaaaatccatcaggaaaagtcatttttttagtcattgttccacctctttatgattcaagaatatttcagtaatagtatatactaatctggaatcgttttcttatagtaaactacgaaaaactaatactatcctatgattttagacaagaaacgagagtaggacagattcccactctcgattataattcttattactccacaattgttgctccaagtacattcttaaaatgcccgatagcaaagtcatgagcttcaggcgtcaaggaagctgttgcactcgctacaacctcgatatcatagcccaaattataggcatcaatggctgtatgtaggacacaaatatccgttaaaactcctgtcaaaacaactgtcgtcacacgacgctcacgcaaacgaatatctaaatccgttcccgaaaaggctgaatagtgtcgcttatccatccaaaagacacgattatcatccttgatagcatcatatacactagctaacttaccataaagttctcgcccagacgtccctgcaatattgtgcggtggaaaaagcttggtttcaggatggaaggtatctccttcatcatgtcggtccatagcaacgaagatatagtccccattgtcataggcttcttgagttacctgggcaatgcggtcttcaatggtttgggcaggctttccagccgtcaacttcccatcatctgccacaaaatcataagagtaatcaattgatatcaatgcctttgtcatattactttctccttttaaaaaagtggggcagtttcctcctacctcactttctttcagtattcttcttattcgtattctttcaatttatcgtagataccttcgttaaggactttaagataagtccctttcataccgagtgaacggctctcaataataccagctgattccaacttacgaagggcattaacgataactgaacgtgtaattccgatacggtcagcgataacagacgctgtcaagcgaccttccaaaccgtccaactcattcaagatagctgaaactgccttgatttctgagtaagacaaggtattaattgccatgttgatagctgtttgtttacgaattgtttcttccaagttctctgtttgaaggttcaacaactgcaaaccaacaaccgtagaggcaatctcaaccaagataagatcttcatccacaaaatcatggtcgttacgccaaataatgaaagaaccgagacgcataccaccaccatagataggtgcaattgtagtcaaaccgtctgggaaatcatcttttgattccactgggaaaatggtcaagtcactgtcaataccaatgttttcttgagtatcataaacacgactaataccacgagtatattcctctggaagttgtttagcttcaaaaaactcttctacacggtcattgttggttttgtatttcatggcaaaaccaaggagagcaccaccaccattgacgatagcagcattacaatcaatgatatctgctaactgagcagccatgttgttatatggaagatcgccttccaagctatccactgagcgttgcaagatagatgtaattttacgtgttttagccagcaaatttgccatatttattgtcttcactttctattgtaatcataataatatcaagccttgcactaatcttctgcgtcaagacctactagccctactattatagcacacttaacccagaaattgcaaacaattgtctgaaaattatttattattctactattcattatattaagtatattatggcatttttaggaaaaacgtccggattttgctcaaatacatcccctttttagaaacaataaaaaccggacaaatctttttgtccagttttaaaaaattagcgcttgtagtatgacaagactcgttcgattttattaccgagatcagccaactcttccactcgaggaagatagacaatgcggaagtgatctggttcattccagttaaagcctttacctggaactaggagaaccttctccttcttcaagagacgaagacagaattcttcatcatcttcaatatcgtacatgttacggtcaatcctagggaagatgtaaagccctgcatctggcttaacagctgatagccctggaatagcgtttacggtattcgtgataaactcacgttgttcatagatacgcccaccaggaatcaagagctcatcaacggattggtagccaccaagtgaagtctgaataacgtgctgagagagcacattagcacaaagacgcatgttggccaacatattaagcccttcaatatagcctttgacattctttttaggtccagagagaaccatccaacctacacggaaaccacagatacggtgagacttagaaagaccattcatagacacacagaaaacatctggtgcaagactagcaatcgcagtatgctttttaccatccataaccaagcggtcataaatctcatccgcaaagataatcaaatcattttgtcgagcaatatccacaatctgttcaaggacatccttaggatagagtgaacctgtaggattattgggattgatgactacaattgccttagtatttgacgtaatctttgatttgatatcatcaatatctggataccagttagatttttcatcacagacatagtgtacggcattaccgccagctagactgacacaagctgtccaaagaggatagtctggcattgggaccaagacctcatctccatcatcaagcaaagcctgcatagacatggaaatcatctctgaaacaccattaccaatataaatatcatcaatatctacatttgggaatccctttagctggcagtactgcataatcgccttacgagctgagaaaatccccttactatccgaatacccttcactgttacgaacattcataattaaatcacgaatgacttcatccggtgctgtaaagccaaattccgcaggatttcctgtattaagacgaagaatcttttcaccattggcaatcatacggttggcttcatccaaaactggtccacgaatatcataggcaacgtgatccaactttgatgatttatcaaatgttttcataagttaatcctttcaaaagatactaaaagtagatacatctagcagaaaataagaaaattcaacacctgatggggatttccacttttattgacaccaactttaggcttggccatttggtatcatttctgaagacttgtcttcctcttttttaattatcatgtttcttacgaagctaataacagattgtattatacctctttttcaagcaatcttcaatttttagataatactgaaatcttcacattactaagagcatcctaaagtaagcagtcaaaaaaagatttcagaaaatctataacaacgctttcattttttagattaaaggagtataataaagctaaagataggaggtagagcttatgtctcaacaatatgaacgtattatggtagctatcgacggttcttacgaatcagaactggcctttattaaaggtgtgcacgttgcaaaacgtaataatgctcagttactattggtacacgttatcgatacacgcgcccttcaaagcgttgcgactttcgactcttacatctatgaaaaactagaagacgaagctaaagctgttttggctgactttgaacgccaagccagagaagctggtttaaccaagattcgcaaagttattgagttcggtaatcctaagagcctcttggctgttgatatccctgataaggaaaatgttgaccttattatggttggtgccacaggtctcaatacttttgaacgcttgcttattggttcatcttctgaatacattctccgtcacgcaaaagttgacttgctcattgttcgtgactctgaaaaaacactttagtcacctctcacaagcacctctggtgcttttctcatatgaaaaagaaccgagatctaaatctcagttcttttttctgttctatttttcagacattgctgattcagacatcacttctgactctgaagttgactggctttcttcgaccaagtcttcactagcagattgacttgaggcacctgcttgctccaaagcaaggctagttgaaaggctctcacgttctgcttcctgactaaggctagcttcaacaatcatgagttccttttgacgttctgtttcacgaagatattcacgttcttcaagttcttcctgacgacgtctttcctgctcacgtctttgagctttttgacgctcacgcttagcatgacgtttttgcgtctcatcaatcaagaccttagtgttgtctttaatatgcatccacttaataagacgaaccaagagtctccataggaagacaataattgactctgcaaagagaagaatctcaaccagaataactcccaacaagctccaagccatgaagagtgtaatcaataactgtgtgaaaatcttcttcaagtcacccaaatgattattgtgaatattaagggtttcaaggaaaagatctaaaatcccttgcaagaggtgtgatttaacagatttgtctccctctaggctcaagtccgtttggacttctgccggagtaacaactgtcaagtccccatcctggtagacatctatacggtctcctaattttatatcaaaatcaaaaagcgtgcgatctattttcttaagtcgcccgtcaggatgactgagataaacaaagtcatcatcaaattttaaaatacgaaacataatttacctgctctttattactctctaaataatagcaaagttaaaaagcccttgtcaagagcttctttttcaatccaaggttttgacaccgatacgatttttatactcttgatacgtttcagtgtgcatgagagctttggcatttttaacccgatctgcagttggtggtttgaccccttccaaaggatatggaataccgagctcacgccatttgaactcacccattgtatgatagggaagaatttcaaatttatcgacatttttcaaggtctttacaaactcaccaagcttaaccaagtgttcgtcaaagtctgtcaagccaggtaccaagacatggcgaatccagactggaacttgtttatcagacagatattgagcaaattccaagatatttttattaggttgacgggtcacaaacttgtgttgttcgggatcaatctctttgatgtcaagtaggaccaagtcagtaacagccaaaagtttgtcaacaacttcatgatactcaggagtattgcggtaagcaaacccacaagtatcaagcgtacagtgaattcctagcttcttagcctctgtaaagagggcagtgacaaaatcaatctgaagcatggcctcaccacctgatacagtgatacctccatgctcaccccagaaatgacggaaacgaagagcctcatctaagacatcttcaaccgtacgttcaacagccttatttgactccatagcccaagtatctggattatgacaatattggcaacgcatcttacagccttgcatgaaaacaataaaacggatacccggaccatctacggatccaaaactttcggttgaatgaacaagtccagtcacctgactgtaatcaatttctgccatggcagcctccttgtaaacgctttttacatgtttttattatacctcttttatcagaaacatgctccatatctgcctgaattcaagcaaaggttatactataatacatctaaaattaaatgatatctatactataccagaagaaaaacaaaaaaactggaaaaatccagtcttttatcatctatattattaggcacgtttcttaagacccaaaaaggctgcagcagcaaggaagaatgttcctgccaatgtcaagattactgttgatgcttcaccagtcttaggaagtgtaacttccttacctttagcatctttaccagtcaatgtaccgtcagcattcactttgaatcctaccgtttcaggagcgacaacacttgttgtaccgtcagtgttagcgatgacaatttggctattttgtgtagacacaattgtttggccagctgcagtgataactggagctgttggtgttacagtaacaacaggttgtccattaacattcactgctggagtttcagggttttgaggtgcttcgcttgtccctttatcagttgctgaagctgggtcttctggtttctcagttggtttatcagctggttttgttgatgaatcagctgttggagccggtgtcgcaggtgtttctggagttgctggtgttgttggctcagctggtacttcaggaactgtaggtgttggtgttgttggcgttgccgcacctgtgtttgaatcattgctacgagccaagtcaccatcacttggggctgttgaaggaccagttgctgcatgatctgtcgttggttgtgtaagaacagcatcatttgtcgcaataccatcgtccgcaaaagaagttactggtacaaaagctcctagggtaagggtgagtaaaagcaagccactatatatagattttttagaagccattaagattctccttttttcatttatcagttaatttatattctaccataaaaaagtaataaaagactgttttaattaaaatcttatttatttttattctaaatctatcaatacactaaaatatgttagaacatctccaaaattatagttctttttctgacaaagtctggcagttttgataggtgaaagaggctttatgacgtactttataggcattttctaatcttattattttgataagctgatattccaagatagataagaaaaagcactttcactcataatgagagaaagtgcctaattagtaaatagtcgcttttaagttccaatattttctaataaaaacatgtagaaaactattcttctgcctcttctggagctgccgtgatgattaccttaagtttggttacacgaccatccttaaccttatcattgataaattcgaggtgtttgtccttgttgataactgaatagtgttccttgacttcttgagttggaatggctcccacacctgtcaaataataacctgcaatagtatcaacatcatcactctcaagttctgtatcaaaatgttcattgaagtcgttaagagtcatagctccctcgacaatataggtattctcaccaatttcacgaacttccacactagatttatctgtttcgtcgtcaatctcaccaacgatttcttccaaaaggtcctcgaaggtaacaagaccagcaacgccaccgtattcatcaagcaagatagccatctgattattggtgttacgaaaggctgccaagagatcatctacgaagatagtctcaggaacaaagagtggttcattcatgattcgacgaagtttgatattttcgaaaccaagttcgaaacctgctttaagaaggtttttggtatgaatgacaccgatgatcttatccttgtcatcttcgtaaacaggaatacgagagaaactttccttgagaatagcttggatattttcttgagtattgtcttcaatatcaatcatgaaggcatctgtacgagggaccataacctcacgcgccatcaattcatcaagagagaataccccttggagcatttcaatttcttcagcctcaagtgtatcctcactcttggtcaacatgtactcaatctcatcacgtgtcatctgctcatctgcatcatcaaaggtcataggtgtcaaacgagacaaaagattggttgaggccgaaagaatccaaacaaagggactgacaatcttacctgtaacaataatgacaggtgccgagtagatggctagattttccttgagattcatagcgatacgttttggataaagttccccaaaaacgatagagatataggtcaagacaaccaaagaaatcatgctacccgctgtcttagcccaagccgcatgaccaaaccaagtcgctatcactgcacctagtgacgcagagagactggccccctgtaagaggctaataaaggtaataccaacctggatagttgataggaagttgtttggattttcaagaaccttgagtaggcgaataaatttcttatcgccttcttctgccttttgctctacacgtgagcggttaagtgatacgagagccatctcagatgctgagaaaaaggctgtaagcaaggttaaaattagtagtaaaatagattgaaataataaggactgaccactagagtcttccattttttcttctcctctaaaaaaaaattctgacttttattataccataatttcccaataaagatgtctattttatgctataattagagtaatttatcatcaaaggagagacttatgtcacttatacgcttagaaaatgtcagtttagcccgtcaaggaaaaacactcttgtctgaccttaactggacagttgaaaaaggacaaacctgggctatcctgggacttaacggtgctggaaaatcaaccctcttacgtttgttgacagctgaatttttcccttctgaagggaaggctgagatactaggctacacctttggtaatggagacatcacgggtcttcgtcaacacatcggtatcgtcagttcctttatcactgagcgtctgcctcaacatatgactgctgaaaaaatcgtccttacgggtaagtacaaaagttcaatcctctacaaagcctatggagacaaagagctacaagaagccaaggatatgctgacttcacttggtgctggagatttgattggtcgtaaataccgtgggctctctcagggagaaaagcaaatctgtttgattgctcgtagtctgatggaagatcccgatatcattatccttgacgaagcaactgttggcttggacctctttgcccgcgaaaagctcttacgtcagattgaccgtatcacctcgcttccacatgctccactggttctttacgtcacccaccacgctgaagaaatcactgaaaagatggaccacattctcctactccgtcaaggaaaaattgtggcacaaggaccaaaaaatgatatcatcacaccggaagttttagctgacttctaccaaaatcctgttcaaattattccaattgatgaccatcgtttttacattaacccccttctataaaaatcgctcaaagaaacaagtctcctagacattatctgggggacttgtttttttatcactactcctcttttattttcgatacaccatacaaaattaaggctggaacgataagttgttctatagaaccatatgaaacaatgaatagcccagcaactacatatagacggtttttgttagcgatgcttatagctcttggaagcatcatagtaggaattatgattaatggagtcataagaatgagttgtataaactaatcaagacctgctaagggattagggtcgtttataggatagtaaaagacagaagttaaattaacaactaaatccctaagcgctaaaataaaagcggtccaaagccaaattgaatcaggggctagatttgattgcttttgattatttgtataatcatgatttttatgttctgggctctccgcataattataaatcttacgcttttcaacgactggtttagtctttttctcaaccagcaggtctttctccttcaactcaagtccatacttcttctgccatttttcaactagtgttaaagtgttgccgtttacacgataggcaagatagaacgatactgctagcagaaacagagtgacatcagtaatgatatggtcaaccaagaagccataaatcagctcaagtaaactaatggctatgagaaggattgaagagattcttaatttcttttggtttatttcagtcattaatgtaaggaacaaaaatatacttgcacactctagaacaggatacagtatgtaaaaaataccactaatatcttttgtagtaatctttacgtagtgtgtagcccacattacagcaaccattcctaagccaagaagaggaacagaggactgccaagctgacgggcttttaaaggaggctaagagcatcggaagttctgtcttcttcatcataatgacgagccaaattaggcaaataacagttaaaactggtgaaaccgaccagggtttaaaaatggaagccggtactataaaataggtaactagctgacaaatatggaaggcaaacacagctaagatgccctcaactttccgcttgtccttcataagcctaaaaacaaaccatattaaaatagcttgctgtggaagttgagaacttagcaaggatacagaattgagcgtttcatactcaaaatgcaaaccataagacctaagcatagatagagccaacaatacttcaaaaaagataagtatataaaagcaaatttttctagacatacaaccaccccgcctttcatttaatcttagagagaatatttttcaataccattatagtcttttttatgtaagcgttttatccttgtggtgaactattttctcttttctttacttgattacaaaacgctccttttttgaccgaatagattctataattaaccacatagacatatgatattgtctgcgaggtagccttttgataacttagtaggtgttaaagtaaaaaaactttcaaacaaagaaaacgaggtagaaacatgactaaagtaataggttttggattaatcgctacagcaataacagttatcacttacagtattctcggcttccccaaaatggaggtgtcgctttggccactatttcctgttgttctatttgccttctttgcaatagaaaatcttatcaaaaaagactataaatctagcctcatgagtactttgattggtttaatgattgctaatgcaatctatgacatactccctatctcaaatggtattctgattgtagcaggaatcctaacatgcctaggactaggctttctttttccaaaccatgagacggaaaaaaagagacattaaaaaaagccaaggaaatttggcttttttgtgttataaattctttgcttaagctcgacctcgagcaagattaatcatatcataggttaaagtattgctagtttctttaagagagtaatcctccaaagtattgacttccttacgaagctgcttggcataacggctagagatcagttcggcctgctcatactcgttaataaccttgcgttccaaataataaccacgcaacatttcatcgatattgtctggattgaggtgggtgataacccgctctacaaaggctcctgattggataatttcagcttcctgaagacgactacgtttcatataagacaagaggtctgagtggtagacaccttccaagttacttaaggcttccaaaatttgctccgtatttgtcaaatatacctcagctatatggtcacgattctcctctgtcaaacgagtaacacgcagaatttcatcatgatcaaggctaaacctaaaggttaaaaccaagtgtaagagtcgacgaagaccacgcacaaagacaacgaaggcataagaaagactagaaacaaagccacggttgatacgacgctccaaccccttgatataacgttgataaaggttatattcgagttcagaaatcttgcccttcttgtaggcatattctagaccttcactctcgatttccataatcatgacacggatattagccaactcttctttgacattattggattcctgctccaagattagattttccaagcgttggttataattgtcaatagtcgcatagatagccccttgatgtttagactgcttgaggtccttctctagctctccaacaacatcattgagaatggcaatctgcatataatggttggtcgtgtgagctggtccagtggctaacttaggtaggactaagataccagttaagaaactcaataaggttacacccgctactgtaaagagcaagagactatgttccagagcagtcatattggcaaccggaagcaaaagaatggttgcaatcgaaactgttcctttgacaccagaaaaggttaaaagagtagcactcttccagattttcttcaatggtcgtttggtccgccaagatctttgggcaaaaactgcactaatcataacaaagcgaatgccaaacatagtcgctgttaagaggacgatagcaagaagcatccagagattatcgtaggtactactacgtagcactggagctgccaagctcggcagttccgtacccaagaggaaaaagaccatgccattaagcataaaggtaatggttccccaaatcgtatgggaaacattatccagcttggcatcaaaaacggtgatttttttgaaacgactggcaagcgagatccctgctactaccacagcaataattccagaagcatgaatttcctcagcgacaaagtaagaagaaatcggtaatactaactctagtaagagggcacctgtaacatctgcagcatccatattgtccaaaatggtcaaaaagaggcgattaaataaggctgtaatcaagccaactaaaaaaccaccaagcacagaaataagcaaattccagctcgcaccaagtagggagaaggcacctgtcgtcaaagcagtcactgccacctgaaaggcaaccaagccagaggcatcgtttagaagaccttccccctgcaaaatgtagctaatccactttggaaaactgaaacgtttagaaatagctgaataggctactaaatccgttggcccaagagccgccccaatggctaggcaggcagacaaaggcacagcagcaggcaagacggccttagcaagataaccgattcctagcgtcgagacaaagatcactggaaatatcaaaaatagaatcaacttccagttgcgtaaaatactagtaatatcactctctccaccttcacgaaacagcaaaggagcaataataaatgctagaaaaagttctgtttcaagctcaaaagctttccctttaaaaagtaaactgatacccactccaaaaataatttgaatcaagggtaagggcagacgagggaaaacacgattgataacattcgataatatcaagctaaaaagaagaacaagcaaagctaatgataaatgcatagctcctcctacccttccttatgacaacagtttgaaaatagttctttttgcttactaatttttttatcaatggcagtgacatcttccttggccaaaagtttatggcaacgttcgacctcaagactagctaactttttcttaattttagccgttttacgattatctacctttttcaaggtgtctttagcactctgcttatctatatatttggcctgcatatttgcaagtttttctttaatatctgtaatcattgtaatttctccaacatcaccaaaaatggtggggtattaatttgattgaggggttggtaaagcatggctgtaaaatcacgctgatccaaactgataacgtactcaagcacagcatccttctccatatcaccaccatcatgaccatagtaaatcataatagccaagcgaccaccaacctctaggcggtcaaggattttctcaatagcctcaagagtcgtgtggggcttggtgatgacacttttgtcggcagatggcagatagcccaaattaaaaatagctgcacgaataggttccgtgacataacgatcaagattttcatgaccatctaaaatgagttctgcattttcaatttccaagtctaacaagcgttgacgagtcttttcaagtgcctgctcctgcacgtcaaaggcataaacctttttagcaagaccagccagaaaggctgtatcgttcccatttcccatggttgcatcaacagcgacactctcatcgtccagcacttctgctaaaaagtcatgagacagatgaatcggacgtttaatcatgctttttcctccttcttgctagctactttgcatccttgccatgagtcgcgacgttccatctctttgtcaatggcattgaggacctcccacttgttgagactccacataggaccaatcaacatatctcgtggcgcatcaccagtgatacgatgaatgacgatatcctgagggataatttccaattggtcacagatgatggacacatactcttcctgactcagtaatttaagacgcccctcatggtagtctctttgcatacgcgtattggtcatcaggtggaggaggtggagtttaatcccctgaatgtcattatccgtcacacaacggcgaacattttccaccatcatctcgtgggtttcccctggcagcccattaattagatgcgacacaatctcagcctttggcgcacgctcacgcacacgcttaaccgtctccacatagagatcatagctgtgtgctcggttaatgagctctgaggtttcttcataagtcgtttgtaaaccaagttcaacggtcacatgcatacgttctgtgagttctgccagataatcaatgacatcgtctggcaaacagtccgggcgggtaccgatattgatgccaacaacaccaggctcattgatagcctgttcgtagcgttccttgataacctcaagtggcgcatgggtattggtaaagttttgaaaataaaccagatatttctgaacttctggccacttgcggtgcatgaagtcaatctcatggtaaaactgctcacgaatcggtgcctcaggagctacaatagcgtccccagaccccgataccgtacaaaaggtacaaccaccatgagccactgtgccatcacgattgggacaatcaaaacccgcatctattggtagtttgaaaatcttttcgccaaaaatctcacgatagtaatcattgactgttctataacgttttttcataaagactattataacactttgacctaaaaaagagagtaagactccgacaaaaattatggatttctgcctgtcctactctcgcttcttatttagtctttttcaaataatcaatggcttcttgagctgttttaacagggacgattttcatcttggttcccagtttcttggcagcttccttggcctcttgatagttagtcttggcatccggatcagcctttttcatttccttggttactggattatttggcacgaagaaaatgtctgcaccactatcagccgctgatttcaccttgaggtaggcaccaccgatatcaccgacagaaccatccttttcaatggttcctgttccagctatcttacggccagccttaagatcttgaccagatacctgatcgtaaatagctagggtaaacataagacccgcacttggtccgccaacaccatcaagtttaaacttcacattctcaggactcttgacctcagtatgatctgtcaaaccgataccaataccatttttaccattggcaatcttgataatcttaccagtagcagtcttttctttgtcatctgtcgtataagtgaccttgacttttgaacccagcttaagaccttgaacgtattttatcaaatcagcagagttatcaaaagtcttgccattgacagctgtcaccgtatccgcaatattaaggacacccttgaagctagaatcatcagccacctgaagcacataaacacccatatactccaagctagcctccttaccggccagagtcaagccctgataaatcgcttggttttgggaagtctccatgtaaaattggttgatacgcatgaaatcttcatcagagtaatttccagttgcctcttcagctgtttgaagctttgcaaaattattaagctgagcatagagcatcaaggccaaagtcgccttggtttgagccaccgccacaaaattgtaggatccttttgaatcatcagctttcttatctacagtcaagacttccttagtatcaaaagcaccacccggaagctcaacataataattatttagcgggaaaaagagggcaaataggaggaaaagtaccgtaaaaatacttaacaaccaccacttaatccgccaaattttccctaatagtgatttagattcgttcttgtttgccacgcttggcctccacttccttaacaactgcttgaggaacataggaactaatgtccccctcaaaataaatcaactcacgcacacgacttgaagagactggtgttacctcatgactggcaatcaaataaactgtttctaactcaggtgccaaccccttattgaaataatccatattagcctcatagtcgaaatctgtcgcattacgaaggcctcgaaccaaataagtcaccccaagatctctggcgatatctacagccaaactatcgtgagccattataaccttgacattgggaaaatctgccacgacctcttccaagatacgcttgcgagtctccacgtcccagaagccctgcttatttttattataaaagagaccgatatagagctcatcaaagagcttgctggctctggcaataatatccatatgcccattggtaatcggatcaaaagaccccgtaaacatagcaatctttgtcatagcattcctttctacaacttccctatcaaaggctaacgcacgtatacggtcaccttactgataccataggttttctgcttccaaatcccaaagtttgaaatttcttcaggcaggtccacagccttatccgtctcacaaaccaacataacttcctcagccaagagcccttgctcctctaactgagtaatattggccacaatctgctctttagcataaggcgggtctaaaagtaccaagtcaaactttcctgtcaattgtgtcagcgcacgcgccgcatccatcttcaaaagctggaactgtttctcactcttggtcatcttgatattttcctggataacagcctgtgcccgacgatccttttccacgaggacagcagaagacatgccacgactaattgcctcaatggccagactaccgctccccgagaacaaatccaaaacacgtcctccatcaaagaaaggaccaatcatattgaaaatggcacccttgaccttgtccgttgttggacgagtcgttttgccttctaacgttttaagcggacgtccgccaaattcacctgctacaacacgcaagtcggtcacctcgtttttactgatttttagtaagacttttctattataacaaaaaatcacacttagatgttggtccaaaggggactagacaagctaaatcccccaagagaacacaaaaaactcgagaagctcccgagtttctattcattttacttatcaccaagtgcagtcacgtagttgtaagcttcgataccagctgtggcaccatcacctacggctgttgtaatttggcgaaggtctttctgacggacatccccaatggcaaagataccaggaatacgtgtcgccatcttatcatctgtaattacccaaccatcttggtcagtgatgtcgagacctgtcaagtaatctgaaactggatcaagtcccacataaacaaagacaccgccaaattcgtggttagtcacctcaccagttttgacattcttgatatcaacactgcgaaccttgatgtcatcacccttgatttcttcaacgactgagtcccagataaacttgactttctcattggcgaaggcacggtcttgaagaaccttttgagcacgcaattcatcacgacggtgaacaatggtcacgctattggcaaagcgtgtcaaataaattccttcttcaacggcagagtctccaccaccaacgaccaagaggtcttgattacggaagaaggcaccatcacagaccgcacagtaagataccccacggctgttgtactcttcttcgccagcaacaccaatgtggcgatgtttggcaccagtcgcaatgataactgtcttggtttggtactcttcatcaccagttttgacaactttatagtcacccttgtcttcgataccagacacgataccataaagattttcaacgcccaatttttccaagggttcgaacatcttcattgacaattctggaccagaaatactttcaaaaccagggtaattttcaatatcagacgtgttattcatctgtccaccaggagcaccttgctccaaagttgccactttaaggttggcacgtgctgcatagagtgctgcagtcatccccgcaggaccagctccaataacaattgtatcgtacatgagtaactccttatatgattttcttgtagagatatcttacacctaatgtgccaacaaagctagaattatgcattcagcacgataagaatcgccataaaagcaaatgccaaaacgggaatcgaaaccatcgacatcataatagcatcatagagggcaccttgacgctccttaacagttttgtctgcacgacgtaaggcacgccatccaagccaaatggcaccaatcaccaagcacataaagaaagcaatcacaaggcctaagaggtaaaatttaaaaatatttaataacataaaacatcctaaagtgagaaatagaaaaggctgagataacattctccaacctctgaattcgactagtaataactgcgcgatgcagtatctgacttgacacttagtcacctttgaggttttcaaaagctcctaatcatcctagtgggagtttaactatggactaaaatgtagccccatcccattaccttttctattgtaacaaaaatcccatcttaaagatattgttttgaataagaagcgaaaaattcttttgttcgttcttctttcggatggttaaagatttcatcaggtgttccttgttcaaggatatgccctttttcaaggaagagtaccttgtcagccacttgataaacaaagttcatgtcgtgactgaccaaaatcatggtttgacctgacttagctgcatcagcgattgatttttcaacctcaccaaccaactcagggtcaagggcagatgttggttcgtcaagcaagagcacatctggcttcatagcaagggcacgggccaaggccacacgttgcttttgaccacctgacaagtgacgtgggtagtgattttcgcgatttgaaagtccaaccttagcaagctcttctttggcaatcttagtagcttcttcgtcagaaagtttcttaacaatcttaagaccttccttaacattatccaaggctgtacgacgttcaaagaggttgaactgttggaaaaccatggccaacttacggcgaagcgtaagaatttgttctttagtgatagtcttgaagtctactttaaaatcatcaatggtaatagtgccagaatcaggttgttccaaatagttcaagctacgaaggatagttgacttacctgcaccagaggcaccgacaagcgctacaacttcaccttttttaatatcgaagttaatgccatcaagaaccttttggcctgaaaattccttggtcaaatttttgatgctaatcattagcggtcccctccaattccagaaatgtcagtcgcttcaggcgccttaatagccatatgattttcaaccgaacgaccaatatactcaatcaagattgagattacccagtatacaagggctactgagatataacgttcaaagtaacggtagtcagcaccacccaagatttgagcctgtgcatacatttcaacgatacccgcactaaaggcaagtgatgttcccttagtcaaaccaatcaaactgttaatcaaacttggtgtcgcaataacagcggcatttggaataataacacgacggtaaacctgtgccgatgtcatcccaagagaacgggctgcttcgatttcccccgcatcaacagcttgaattgctgcacgaatggtttcactcatgtaggctgcttcgttaaaggcaaaggctgtaatggcaaagatagctggtggaatctcattaatgttccaatctaaaccaaactcaccattcaagtaacgaaggaagagtggaataccatagtaagtcaacatgagttgtacaaggattggtgtcccacgtaagaagcttacaaaaactgcttgaatcggataaaggatacgtactcgattgatcttaacgaccgcaaagacaagggccaaaatcaaaccgaagaaagcacctgcaatggtcaagcccaaagttaaaggcaagcgttccacaatcttaggaacagcatcgaagactgccttccatgagaagagtttaccagctggcatccaagatgaaatccacttgaagacaatcgtaaccagttgcaaaatataaccccaaagaatttctactagccaagacaagggaatggctaaagtaactgctactgccaaaccaaccaaacccatgataacttggagataccaaggtgaccgattaaatgcttctatactctttttcacaatgtcgccctttctttctaaaaaagtaggttagcctagtgctaaccgtccaattatcttatcataaattctatagtattcattttagcacgactcagaaagtctgtgaaatagtcttttcttatcatagtgataagaaaatcgtatcactgatagcaataccttattaagactaagaagatttgaactaattccttatttcacgaacaaagtgagcataaaccgaggctttccgacgtgagaaaaacacctgaaactttaaagtttcaggtgttcggaagttttgagaccttaggctcaaaacttagtcatggagcttcgacgaaggtcgctgacgtccgtcatcacctcaggaaagcctcaaaagaaagctttgtgttcaattcaaagctgagacagcagtctcaacttttaacagtcttatttcaaatcactgacgtaatcgccaccgaagtattccttgctgagtttggcaagggttccatccttcttaagctctttgatacgcttattaacaaaggccttgagttccttaccttgcttatcatttgagaatagaagatattcaagaccatcagtcttcataccaatatcgtctttaatcttgtttacagctagcttatagccttgatctttgacaatgtactcagacgaaatggcatcgtaaaggataaaatcaatttttccttcttgaatgtgttgaatacgtgttgaaagacccgttgagctagaagcatagttgatagtaattggtgtcttgtccgcattggcatggttccaattttcaagcaactgagcataattagagccaggaagcacctctgtcgtcttaccagacaaatcatctaggctggtaaacttggtaccctcagcactagtgatggcatagttagaacgtgaaatcggatctgagaaaccatatttctgagcacgttcttcattgtagttgaagtcgttagccgcaatctgataacgtccagaatccacccctgtcaagatggaatcaaaaggtgtcgtcacaaacttgacctcatacttgtccgaatccttgaaaatagccttgaccaaatcaatatcataacccttgaagtcgtcgccttttttgaaagtgaaaggcgccgtatcagagtctgtcgcaacagtaatcgtctgcttttcaccagatgccttactgtcactcttgttcccacaagcagccaaagtcaaaaccgacaagccaagaatccctaaacctgtaagccattttttcatatctataatcctcgatactttcattaatagttagtgataacagtttatcatcttcctacaaactcgtctaataataaaatcctaagaggtgatagataaaggttataggggaatcgatacaacgaacaataagaaaagagctgccactggtgtgacaactcttctcgcccaaaaaagctttctgtacatgtttaacatcaaatgcaataaaactctatttttccttacttgatgacttactgcttgaatcgctactgtcttcaggttgataatctgataaattcttatggatgcgttcagcgtaaacagctctgcttcctgattcatcatgatcgaccaaagcttcggcaagctctttataatcttctatagaaatcgtccagttgcctccatcatctttggtaagcttgaaggtcttttctagattatcagcacctgtcaaaggtgtataggccatttctttatcaatatccttaaattgtgtcaaatctccgttaaagttttcaccataaaggaatttcgttgtgagatctttggctttacctttttccacatcgttgttatcagcttgattccattgtttcaacttgtcaatgtcgttgtcatagagactcataaggagagtacgaacagcagctgcagcaccataggcactaacagagcgtgaagtaaaggtaactgtcgcttcatttcctttaactttgacatccttcagcttatagtcctgaatcttaccaatcatattacgacggaccttaaggaacttagaaagcacttgggttggagtcttggcatcatagccttcaatgtatttaaatgtatacttttcttccggtgtatagcccttttcttcgatagtatctgcaacttgtttttcaaagactttcgtttcagtccaggtttcgtaattttcaccgtatagttttgaaaaaccgttactagattttccaagcatagtatcaattaagactgtcgcatcagccttggcacgttctgtcggagttggtgtcgcttttttcttctcagctggcttattggaagcacaagctacgagaagcaagcaagctgccagaatcagtcctaaataggtaagaacttttttcattaagattattccctcatttcttttagttactatttaagatagcataggtctgatgattcttcaaggtcactttccaaaagaaaaaatcaaaactctactattataatgactctaaatcatctaggtccaattgcctgccttcttgatcttccagacccgtcagcgtcacaccgagcaggcgaacaccgctgctattttcctccaattgatcaaaaatggtatgggcaattctttcgatggtgtcgaaatcctgagtcgatttgtccaaggtcatacgcttggttaaggtcgagaaatccgaataacggaccttgatgacaataattcgaccaacttttttatttttctgagcactttcagctacccgcctagcattcttagtcaactcagccttgatgtcatcttcattataaagaagcttgccgtaggttcgctcacttccgatagatttacggacgcgattgggcctgacaggactattggaaatccctctggcctttcgaaagagatcaaatccaaaacgtccaaaacgatcaatcagcgtcatctcaggaatcttcagaagatcggcaccggtgtatatttccatatcatgaagacgttcaactgactttttacctaccccatgaaacttttcaatagggagcttttccaaaaattcctgagcctcctctggaagcaccaccgtcaaaccagcaggcttttgaaaatcagaagctagtttggcgataaatttattgtaggaaacgcctgctgaacaagtcagatgaagttcctgccagatatcatactggataagtttagctaccttaaccgccgatttgataccaagtttatttatcgtcacatcaagataggcttcgtcgatagacataggctctaccaagtcggtatagcgtttaaaaatctcacgaatctgcatccctacctctcggtaatgactataatttcctgagataaagacagcattaggacaacgttcataggcttccttagaagacatggctgaatggacaccatattttctagcctcgtaattacaggttgataccacaccacgtccccctgtttttctagggtcgtgaccgataataaccggtttgtccttaagactggggtcatccctcatctcgacctgagcaaaaaaggcgtccatgtcaatatggatgattttccgactggtatcatttattagaggaaactctaacatggctccctgcctcctttctcagatttatctcattgtaaagcttttcacataaaactttgggactacaaagcattctccccttatgataccaaaatctaccaaaaaacagaaatttataatacagatttgtcgttttcaaaactgtattataaaagaatgtctctaaaaacacagttttaaagttgtgtaagcggttactgtgtgatagaatacttctagagaatgtaacagataattttgttactagaattataggagattcaaactatggcaacggttaaaaccaacacagatgtttttgaaaaagcgtgggaaggctttaaaggaactgactggaaagaaaaagctagcgtttcacgtttcgttcaagcaaactacacaccttatgatggtgacgaaagcttccttgcaggaccaactgaacgctctctaaaaattaaaaaaatcgtagatgaaactaaagcaggctatgaagctgaaggacgcttcccaatggatactcgtccaacttcaatcgctgacattgacgcaggatacatttcaaaagaagatgaacttatctatggtatccaaaatgatgagctctttaaattgaacttcatgcctaaaggtggtatccgtatggcggaaactgctttgaaagaacacggttatgaaccagacccagctgtacacgaaattttcacaaaatacgtgactacagttaacgatggtatcttccgtgcttacacttcaaacatccgtcgtgcacgtcacgctcacacagttactggtcttccagatgcttactcacgtggacgtatcatcggggtttacgctcgtcttgccctctacggtgctgactacttgatgcaagaaaaagttaacgactggaatgctatcaaagaaatcgacgaagaaactatccgtcttcgtgaagaagttaaccttcaataccaagcacttcaagacgttgttcgccttggtgacctttatggtgtagatgttcgtcgtccagccttcgatactaaagaagctatccaatggacaaacattgctttcatggcagtatgtcgtgtaatcaacggtgccgctacttcacttggtcgtgtgccaatcgtccttgacgtatacgcagaacgtgaccttgctcgtggtacttacactgaatcagaaatccaagaattcgttgatgatttcgttatgaaacttcgtacagttaagtttgctcgtacaaaagcttacgaccaattgtactcaggtgacccaacattcatcacaacttctatggctggtatgggtgctgacggacgtcaccgtgttactaagatggactaccgtttcttgaacactcttgataacatcggtaactctccagaaccaaacttgacagttctttggactgacaaattgccttactcattccgtcgctactgtatgcacatgagccacaaacactcttctatccaatacgaaggtgtaactactatggctaaagacggatacggtgaaatgagctgtatctcatgttgtgtatcaccacttgacccagaaaacgaagaacaacgtcacaacatccaatacttcggtgctcgtgttaacgtacttaaagcccttcttactggtttgaacggtggttacgacgatgttcataaagactacaaagtatttgatatcgatccaatccgtgatgaagttcttgactttgacactgttaaagctaacttcgaaaaatctcttgactggttgactgacacttacgtagatgcccttaacatcatccactacatgactgataagtacaactatgaagctgttcaaatggccttcttgccaactaaacaacgtgctaacatgggattcggtatctgtggtttcgcaaatactgttgatacattgtcagcaatcaaatacgctacagttaaaccaatccgtgacgaagatggctacatctacgactacgaaacaatcggtgaatacccacgttggggtgaagatgacccacgttcaaacgaattggcagaatggttgattgaagcttacactactcgtcttcgtagccacaaactctacaaagatgcagaagctacagtttcacttcttacaatcacttctaacgttgcttactctaaacaaactggtaactctccagttcacaaaggggtatacctcaacgaagatggttcagtgaacttgtctaaattggaattcttctcaccaggtgctaacccatctaacaaagctaaaggtggatggttgcaaaacttgaactcacttgcaagccttgacttcggttatgcagctgacggtatctcacttactactcaagtatcgcctcgtgcccttggtaagactcacgacgaacaagttgacaacctcgtaactatccttgacggatacttcgaaaacggtggacaacacgttaacttgaacgttatggacttgtcagacgtttacgaaaagattatgagcggtgaagatgttatcgtacgtatctctggatactgtgtaaacactaaatacctcactccagaacaaaaaactgaattgacacaacgtgtcttccacgaagttctttcaatggacgacgctttgggataaaataactaaagagctcgcaatagcgggttcttttatttttgccaaaaactagttttcattatatttttctaaatctgctatcatttacatttgacttttcatcagattagctataaaattagagcgtttccgtttggtatctccaaacgcttccttctcagaagcaccttagagaaacgatactcaatgactgttaaacggatggtttctaataacacgtagactatcattgttataagattaaagagtataaggaggacaaatgaataagaaaagttttaagctaattggattagtgtttctcgtagcaagcactgtcctgctcgtagcctgccagtctgataccaagaccgaatcctcaaagcccaaggacgttcaatgggggtatactggctctactggtccagaccattggggtgacctttctaaagattatgaactcagcaaaaatggtaaagaacaatctccgatcaatatcaccggtgctgaggacgttgatcttccagaactaaaccttaataatcaagaatcagaagctcaagttgaaaataacgggcatacgattgaagtcagctttaaaaatccaaagaataccctaacgattggtgatgatgtctataaattacagcagttccattttcacgcacctagtgagaatgaaattgatggtcatacttatcctctagaggggcacttcgtctataagacagataatgggaaaatcacagttgtctcggttctctataattatggcgatgaaaatcaagccttaaaacaaatatgggataaaatgcctcaggcggccaatacagaaactgagcttcctcaggctatctcactatatgatttctatcctgaagacaaggactactacaacttcgaaggttccttgacaacaccgccatgtactgagggtgttaactggattgtcttcaagaatcaagaaaccgttagcaaggaacaagtggaaaaattcacccaaacccttggatttgaaaataaccgccctatccaagatacaaacggtcgacaaattaaagaataaagcaagataaaaagcttgatgataactcctcgcatcgggctttttttcgttgacaattagttatagactttgttacacttgccctatgattatcaaacatacaagagatacactctcagaaacttacctcgatgccgtagccatccgaaacactgtttttgttaaggggcaaggtgttcctcgctccatcgagattgatgcgaatgaagcctactgcatccactttgttctatatgatgacaaaggcaaggcagcagcaaccgtacgcctactaccgaataaagacttgactcagcttacgctccaacgtatggcggtactcgatgcctaccaaggtcaaggtctggggagcattctcctaaaagaagctgaagattttgcacaagaacaaggcttccagactatttctctccatgctcaactcggtgcacttaagttctaccgcaacaatggctatcaagaagtcggtaagatctttgaagaagctggtatccaacacattactgttgaaaaatccttactaagtaaaaaagcttaagcagttgacctactgcttaagcttcttcttttgtcgcaaatataggataaccatgctcgacagccagaactgttacattttctctagcttttaatctctttgtgatttttttccagctacgatttcccataatgataacgattatcgttaccatataaactaaaaaagcaggatatctagcaaagtcggtaaatgtcaattttagggactccagaattttcctgagtataaaggcgtaaccaatcacaatatgagtgagtccacaaaagtaccctaaacctataagcaaatactctatttgaagcttcttggaacgcctcttgtagagcaacttatagtcttgaccatacttttcaaacacaggaaaatgaatgtcaaaccctcttctcatacgaaggactcttaaatcgggttgggcacgatacccaaggcaatgaatcagtttgtatagtagctctcttatcaaaatataaaaagaaataataaggttagataacaagctaataaataccaaaactacaaaagagcctacatctctatccgtcgtcaaaaaaatgatcaccactgtaaaacacataccacagacaaagagactactcccgttaagcatgcaaaagagcagactcagaaaccgagggacaaatctactttgtttaggtggcttaagcgaccgttgcattatgaactccttcttcatgattccaatcaaaacatggtaatttttgattaacttggtgagcccttcgcataagcatcactttagtctttatttctttagaaaaatagggtaaaaatactcctctgagataacttttaagttaaaataacggacaaagtgacttttcagatgtatgagccatcttacagaaaaaatcaaaacaccacataagagcaagaagattatatagccaacttttcctaaggtgaagctataaccgattagaataactaagatgattaagagatagagtctaccaagagtcgctaggaaataaagaaattgatgtctaagagagcgcttatcatatagtattttgtaggcatttgtcgttttttcaaaaaatactatatatgacgttctacctcggtaatcctcttctccaaaggggcgggcatggtaaccacagaaatgaaaaagtttaaatatgataccattccccatcctataaaatgtcacaaccaaaagtacaacagcaataacttttggaatattcacctcttgcccgacctgaccaacaccaaatagatgctccaaccatacaaatgtaacataagacaagactatcaaacatatcttcaaaaagataaacaattgtgtcgccccgacactaatctcaccttctagaggattaaaagatgcccctcttctatttttatttgtcagaatgtaccaactcctccttcatgatttcaatcaaagcgtctctatccttaatccattgagctctctcatccttgtagtaagtgcgattacttaggaaaatcgccgcacgttgagctgggatgttaatcagaacaaaggtacctgtataaccagtatgaagaatccactctccttgaaggtcccaagcgatactacgttccttattagattgactgatattctgcgtcatatttttagcaaaatcatccgtcaaataatggttaacaaaaatctctaagtcttttaaggttgaaaagagacctgccgaccctgtgtgttctttgagaactcgagccttgggatcatgaacagtccctcccggaaccccctcaacagttggaacagcatggtcaactggcccaaaccctgtttcaaacataccaaacggttgaaaaatctcggagtcaaagagcttatccagtgttgttccagagactttttcaagcatcaaacctagtagaataaaattaatatctgtatacaagaaaggtttatcagccttaactttgatggcattaatagcagcaatcaagccagcttggtctaagtcatcacgatttggaataaagggatcaatgccactactgtgagagagaagttgacgaagagttaacgttttatccgctatcgcaggataataggtagatagcttctcgtctaagtccaatttccccgcttgtaagtagaatagacagagagtcccaactcctactaccttggaaacactagctagatcataggtcagtcctggaactaccggatgatttccatcctgagttcccagataatgctcctgccaatcttgtccgtcataaagtgcaaggctggcacctggaaagatgtcagccttgatgtagtctgtaattgttgacaatgtttgttgaaaattagtcattactttgtaaaccaaacctcaatattgctcatgtcagtgagtgcgagcaagttccctctgctgtctaggtaactagagaactgttctttttcaagtttatcatgcaaggcaaccaagtcatagtcttctgctaccttaaactctagaatttccaaatcccaagtctggtctgggctcacttggaggtcaggaccttctgctttttcaaagtggatagacaaaggcaattcttcgccaaaaagattatcgtagaagaaagctgcttgagctgtatcaacaacgttcaaggtcaaagactcaaccgtaaaatctgacactcctttgaaatcttctttttcttcaacatctgcgtattcaactgtcttaagagtagacaagtcatcttcagcatgcatcaaaataagaccattctcaggtgagattgtttcaaaggcatagcccttttccccttggaaaatagacttggcttgatgatcatcacgcgccaaaaggtactcaatctcaagtggatttgaaactttaatgaccactttattaattttcttaggaccttcaacagcgcgacaacgataagctggtgactcctcaatcacaaaaagtgagttacggtctgcccaatctgtgaagaccgcaagggcattttcctcagtcaaaagcttaaatcctaatgtattttggtaaaaatcaatattttcttgtctgttatttacacgaaaaattggtgtatgaaacttaaaattccctgattgcgtcatgacaacctccattcttctctattttatccgaaaagagcctgtgtgacaaggattttcctaagaaaaaacaggattgtaattttttcactttatttcacacaaattatgaaagtcattacattatcttcacttttgggctagcatttccctcattttagagtataatagagtctatgaaaactcttgtcaataatctggcatttagacatgcctatcagggattttttttactgctgatgatagctatcccaaacatcaccttaggtatgacaaccttatataacaatcagactgggttgaccttcactagccttgaaagctgggggattatcgctgtcaacctcattattttttatattacctatctttgggctaaaagcgaaagattgattcacagctttagcttaaatcgaaaggacatcaaagctattatctggggctttgtcattatcttcttgatgggacttatcggaagtaacctcatgttactgacccacaccagttaccatgcagaacttcaaaagaccctcacaactattcctatcctacctgtagcgattggtatgatgactacagccttcctacaagaactactctttcgtaagtggattttcacttggttgtcgccttattcaacagtagctgttttagtgagttctggtctcttttgtctcttccacatgcctaccaatcttgcccatctcctcctttatatcggaatgggtttggccctctctatggtctaccaaaaaagagaaaacttatctacaagtatcacacttcatgttttgtggaacctttacaccttaggtgctacaattctggttatgactactcctatgtaactgagaatgctttctcagtttttttgttactctcaaaattttaagcataaaaaaatctgaagcttgaacttcagatttttttgtattgattaaaggtagatggctttgaacaagtatacagccaaaactcctgcaaggattggagctacaactggaacccaagcataccaccatttagaatcacctttgtgctcaccaagaactgatgttggcaagatgtggtgaagaagacgtggcatcaagtcacgggctgggttaagggctggtccagtaggtccaccgaatgaaagaaccaaagcggcaaccaagaaaccaacaccgatgtgagctgtttcaagagctccgtggaactgtccatcaaccatttctttagtgtaaccaacagcaagagcttgttgggcaagcttgtgaccaaagtagttattagtcaaggcaagagcaccaaagaagagaaggaatgaacctgcaaactcgttggcaaaaccgttagcccatgcacgattacgattttctggagtgtcgtcatgatcgtcaactgctgaaatcgttgagaaagtaccaagaatattgtttggattctcagtttgtacatagtaaggttggtgaacccaaaccacgatagcttgacctaaaaaggcaccaagaagttgtgcaataaggtatccaggaacacctacccatgagaacaagccagatgcagcaagtccaagtgtgaaggcagggttgatgtggttaccagaaacatcaccaaacataagggctggcatcataacaccaaaaccataaccaaaggcgattacaatccaaccagatttgttaccttttgttcccttaagctcaacgttggcaacggcaccattaccaagggctacaagaaaagcagtcgcgataaactcagtgaggtatttcaagacccattcactgctgagcgcttcttttagaaaatcattcatttgtctctttatttcctttcgattttacaataatttagacatctatcattttatcaagtataatgtctgatgtaaagatatttctgaaatgtttacgtattctttttgaggtttttaaatatgaaatttaaccagtttagttacatccctgttagtcctgaaattgcttgtcaggaacttcgttctttgggctttgaagtctctctagataccagtgccaaagccaattttgaggcttttgttcgcaagcacttccttttctttgaagatactgatttggctttgaaaaattggatcgctgatacagagactgatctcctaaccttcttccaatcagaccgtcctttgactgctgacgtctttggtttggtagctcttcaaatgctaggatttgtccctaatgtagactttacagatagtgttgctttcctagaggaaatggctttcccaattacttttgatggtagccttaataacctacatcaattgctagcaacacgcacacagtctggcaataccttaattgatcagttagtagctcaggatttaatccctgcaagtaataactacgtcttctttaatggtaagagcttggcaacatttgacactaatcagcttcaccgtgaggtggtttatgtcgaaacacctgtagataccgataaagatgggcagttagacttggtcaaggtgactatcttacgtcctgatgtggacttcccggttccagccatgatgaccgcaagcccttatcaacaagggactaatgagcctgcttcagataagcttacccacaagatggaaggtgatttgctcgtcaaaccagcaggtgaaatctcccttaaccaaccagaaattaagacaccagaggcagaccttacgcctatcaatcctgtcacgaaggctcaggagcggtttgctcacacagatacctacacgcttaacgattacatgttggctcgtggtgtagcttctatctatgtgtcgggtgtcggtaccttcaattctgaaggcttcatgacctctggagactatcagcaagttctggcctataaagctgtcatcgactggctcaatggtcgtgcacgcgcctttactagccgtagtagacagtataccatcattgcagattgggcatctggtaaggtgactactaccggactttcatacttaggtaccatgtccaacgcccttgcaacaactggtgtcgacggtttggagatggttatcgctgaagcgggtatttcttcttggtacgactactatcgtgaaaatggactcctcgtcagtcctggaggataccctggtgaagatctcgacaccttgactgaatttacctattctcgtgccctattagctggagaatacctacgccaccaaaaaaactaccaagcctacctcaaagagctaagcacagccattgatcgtaagcacggagactatagccagttctggcatgaccgtaactatgtgcagttcgcagatcgtgttaaagctactgttgtctttacacatggtagccaagactggaacgtcaaaccgattaacgtctatcaaatgttcaatgctcttcctgacactcttgaaaaacacctcttcttccacaatggtgcccacgtttacatgaatgcttggcagtctattgacttccgagaaagcatgaacgccttgatttgtcagaaactccttggtttggagaatggctacacactgcctactgttatctggcaaaataaccagtctgaacagacctgggaagtcctcgataactttggacacgacaatggtaaaaacattcagtttggtgagactgaagctagcatcgctaaccattatgaagaggaaaccttcaccaaatacggtaaagcttaccaaagcttcaaggatgacctctttgcagacaaagccaacgccatcaccttggactttgaactggaccaagatatccaaatcaatggtcgtgtccacctagagctcaaggttaagtctaacacaaaccgtggtctcatttcggcccaagttctagaaatcggtgacaagaagtatctcgcacctattcccgcactcaaacgcatgaatctagataacggccgtctattcaaggaagaagccttacgtgaattgccattcaagcaggcaaaataccgtgtcattaccaaaggacaccttaacctgcaaaatcgtaaagacctcctcaccattgagaatgtcactccaaatgaatggatgactatcagtttggatttgcaaccaaccatctacaaactcaataagggtgacaaactccgacttgttctctataccacagactttgagcatactattcgtgacaatagcaactatgaattgactgtggacctaagccaaagtcagatgacattgccttattagtctttatcacaaaaaatcccataggataagaactcccatgggattttttgattgtgtagaaataaacaagatttaatcttcaatttttacgattcattttaatgttatttaaacaaatgagatagccaagacagtggaacaacacttggcataatcataactaggacttaaggttctttctctgctcctcaacaggttggaaaagaacctttttgccccatcttccttttctcaatggacaactcaaccttaaaaccaagaaatcctccctaatgacatcaatagccataacgaatcgctagcaattttcgcaactctgccattcgcttctcgataaagggagacaaggttagctggtcttttctgaccacttcggatatttccagtgacatcctgcttaagatatagggagtggctgaacgagagtctgcaagttccgttcggtaggagtgcaggacctgcttcaaatcagcataatctggcttatctccaatagtttcaattacttcatcgatgatagctactgcttgttctcgtctctctttgcctcctgcaaaccatttaagtcctgtcattaagaaaacctccttatttctttcaactaatttttcaatcacatctttagtatagcaccctgatagtcatttaaaagccaccgtcccaaaaagtggctatatgtcctaaatggtagccaaatccagattggatgctgactagatagaggatttaaagatatattcccaatgactactcctaagattgctgatacgacacgtaaagaacgtagcacagcagaactaattttttgtaatatcaccatggtaattccttttctactagagtcatttacataaactactagggcgttatctaaagaatgatttgctattattctgaatctagcatggctaaagacacgaatctgtcactttccatgcttcttaaaacaaatacatcacttctcatttctacaaatcagctgactaagatcatcagagaacgataaagaaacataaagtgacaaggtataaaataaaaatgttctttcttgatgccagaaaaatgttatcacacattgaatacagacagccaaaataacttgtaggataaattttatgtattttctagaaataacaaattgttccaatagtaatcatcctttcatgacattttttgaaaacccagaccttgcaagttttgtatatacgatagaaatacatccttcaaccattgggaattcttctctaattttcacatatttacttaatcactttcttattataacacttttatgcaaatatcttctagattacctacagaataatcaagtaaaatcatttattgtttaaaatattttttgacttgaaggtaagatagaaaatcacagaggattaacaaaagcattaatacggctagtactatacggtctgtgatatcactgaatgtaagtaatgtgtaaaactctacacaaagcactagaaatgagatgaccagaaagacaatgaaggactgccgtattgttaacggattcactgaatctggacgcttcttaagcatacggcagagcagaccatttaccaaaatgactactaaagctagcgctccgactgctagccaaatctctggagaggtcttgcttttgtagagagaaatactggtacttataaggaaaactgctagtacagcagtgacgaccctaaaaaatcgcaatactctcgaactaatattctttaacttcatgataaaacacttaagctatgaataacctcagtcagccttgtaaaccgaataagctattacattaaactttattcctttctgtatttttttatactgctgtaagatctcaagtaatcccttagcgattaaactctactggagatgtaatacaatagcgtcattagcactgatattttaaataagcgaatatacatatctttgttctttctattacaaagataagcaatcaaatataatacaatttccgctatcattagcaagaataattttacttcgggaacatcaaaaataagcatttgcaagcacctcacgttcaaaggagcaaaaggttactttttaaactgtgcccattttttaaaaagcagactataaagaagcaaggttagcccaaacaagttaatggtatggtggactgcatccaaacttctaaatagattagcgaggcccattcctatgagaatggtggccagtaaatacggttttgagtttttgaacatacttttctccttaaagtgtttttagctatctgttcacaagctatgaattttattatagattgaaagctgacaaaaaagtagtgacataaatgtcactacttgtctgattttatatccttgataatcgtacacataagaaagagaaaaagacataacccaataagatttaggcattgaagtccaaaactcagtttttctcccaagttatgtaaggcaacaaggatgaagcccatagacatcattagagacactaggcgttttttagtcataagtacaaatacctcttcttttatatcgaaattttcaaccactattcacatgctattcacagactagcagttgataaggtatctcaattaggatttctttttagcggaattggtagctttgcgtttttcaagaaatgacataataggcttatccaaaaaagtcatcaaggccatgaaaaccatccctaaaatataacttttcaaatcaaacataagccatcaccaccagcatgttgctccataaccaacaccccctacgatagcacctccagctgctcctgcgacagcaccttgccaagtacgtgttttgatacctaatcgtaaaccattaccaactcctgtagctactccttgtttagcaaaacctccccagctacatccgccaccttcaacgtttgcaagtgcctcgagatcgagtgtttcaaaattgttcattgtttgtgttgtcattctaacaacctcctaaaatattattttttagctttttctcttaagctatggttttattataggttgcaagccaacaaaaaagtagtgacatgtatgtcaccactcgattttgatttttaagaaatcttttcgaatatagaatctatggtctagattagcttactctccttccattgcacctgcttgtaggctgtacatcttgtggtaggtgccgccgagggctaggagctcctcatggctaccgtgttcgatgatgcggcccttgtctaagacatagatgcagttggcatcttggattgtcgataggcggtgggcaatggcaatggttgtgcgtccttgacgcatttttgctagagaattttggacaatagcctctgtctccgaatcaatattggctgtcgcttcatccagaatcaaaatcttaggctggctagcaacggtcctagcaaaggctagaagttggcgttggccagttgaaaaacttgaacctcgttcagaaactggagcatcgtagccttctggaagtttgtcgataaaatgattggcatccacaaactcagcggctgctttaatctcttcatcagttaaatcctgatacatggcaatattggatttaaccgtgccatgatagagaaagggttcctgaagaacaagaccaatgttcttacgcagctctgcctgactataatcgcgaatatccacaccgtcaagaagaactcggcctgattggaactcatagaaacgcataaacacgttgataatagaggatttcccggaacctgtagaaccgacaaaagcgatggtttctcctttattgacagagaaggaaatattatccaaaatctggtgcttgccatcataggagaaggagacattttcaaagcgaatattcccctcagtaaccttggcatctgtgcctctctgctcaggttcataggtgcgctcgtcgatcaaggcgaagacccgacctgctgagaccatcgaggtttgcaaggttgagaagttttgtgtcacttcaatcaagggatcaaagaggcggttaatgtactggataaaggcatacatggtccccgctgtgatgcccaaatagatacctcggtagccaaagtaggccatgagaacagcatagcccaggagcttcagtaaactcatggctgggcgtagaaagagagaatccagtgacatggaacggctggcgtaaatcaggtgttcctcattaatggcatcaaactcttttttgaggcgtttctcttggttaaaggcctgaatgatgcgaatcccttcgatactctctgacagtttggcatttatatctgaaagcaaggctctggtcttttcaatgatgaccactgattttttgcggtagagattaaccaaaagaacaatcagaggaagaaagagcacaataagcccggtcagacgaatgtccaagatcatcatggtgtaaagggtggtaacaaatataaagatagccgaaataaagctagacagaatccctgagaacatctcactaatagtctctgtatcattggtcaagcgggaaacgatagagcctgctggagttttgtcaaagtaagacatgcctagtttctccatattggcaaaggcatctcggcgaatatccctgacaatgctgtaggacacacgcgcaaaaaagagatttcccaaatactgaactagtgtctgcaaaagataaagaccatagtaaccaatcagaattaaacttgccgcctgattcatatcatgaagatagtggtcaataaaataagaggccacaaggggaataatactcttgataaccgttgtggacaagaggaaggctaaagctagaaaggtcaagaatttgtaaggcttgagataggtcaagagacgcttaaacacagaccattggttttgattaggcatcatcttcttctcctccttccatttctaactgttgagactcataggtcttggcataccaaccacccttagctagcaaatcctcatgacggccacgttcaatgatacgaccatcctgcatgactaagataaggtcagcgtgcaccaccgcactcagacgatgggcggtaatgatagttgtcttgtccttgcgggtatgtttgagattgtcaataatagcatattctgtcttggcatcaaccgcagatagggagtcgtccaaaatcaaaatatctggatccaaaatcatggcccgactcatggccagacgttgtttttgaccgcctgataggctgacacccttttcaccaatgatcgtttcaaaaccttcaggcatatccttgatatcatcataaacttgagctaacttagttgcttcttctaccttgtcaaaggagagatcaggattaccaaagcggacattgtctaaaatggaactggcaaagagaaactgatcttgaggaacatagcccatcaagctacgcaagtctgatagacgatagtctcggatgtcatgaccattcaaatagatggctccttgattgacatcgtgctcccgcaagagcaacttgacaagggcggtctttcctgaaccagtctgcccaaccaagccaagggtttgccccttgtccaaggtgaaatgaatatctctcaaagtatcctcatcctcaaaagcaaagcggtcaatcgcatattctaggcgaccattttcaatacttgggagagggtgcacaggattttgaacatctgattcctgctccagaagagtttcaatacgttggtaggacacatttcccctctgtgtgatattaaagaggaagccaatggccattagaggccaaaccagcatgtccaaataggtaatgaaggttaccaaatttccgaccgttatctgattagcctgaatcataaaggcaccgacaagaagggtcaaaacataagatgagccaacaaagagtaagaccaaaggatcaaaaaggctatcatacttcatggtatgcatattctttttgaaggtcatcttattggtctcttggaaggactgaagctcagcctcctggtagccaaaagacttagttaccttgatacctgatactgactcttgaaccttattattaagttctgaaaaggctgcctgggattctccaaaagctttatgggtcttgcggcccaaacgactggtcgcaaaagccatgaagggtagaggtaagacagccaccagtgtcatctgccaggaaatgctgaaaaacatggtgattagggttaccaaggctgtgatagacgcatccacggctgacatgacacctccgccagccaagcgggttaaagagttgatatcattggttgcatgggccatgaggtccccagttcggtacttttgataaaaagaaggcgacatcttggtaaaatgctcaaataggcgtgaacgcataatctggcctaagcgataagaagtcgccaagatatacatgcgccaaacatagcgcaaatagtacatccccaaagctgccaaaagcaaataaacgagattcaaaagcaagatctgattggtcaattttcccgatgtgatagcatcaatgacccgccccataaccataggaggaattagattgagaaccgaaaccagactcagtgccaaaatcccaacaatataccggcgtttttctaacttgaaaaaccaccaaagttttgcaatgattgattctttaaaagacaagttactcctcctatccttacaaatggttaataatagacctcgtataaatctcttatgttaaggttacttccaatagcgatagattgtgccatcttctaactgaaagtgaccaatataagataacttcccaaaatcagtagactctggtaattgataagcaaaggaatcaaaattatataccttgttcccaccatccatagagtaactctccttatcatggataacggattcatccttcttagggttccaaatgcgtctgatttcatcagatgtcttatactctctgacaaaattgtacaattcaaagttagttgcctcactgagatagcgaccatcggtgttgtagttggctaattgaggctctctcttagactcagaataattccaaacctgtcctctttctcgcatgatatcggcatcacggccactttgataagtatctgccttaaccatcgtcattgttgctcctaacgttaatacggtgactactgtcatcattaagtgtttcattgtttctccaaaagtgtttattcatttttccctcttttgaatgtgttgtatttgtatgatagaaaataagtgaaacctgagacgcgtagggtcccaggttttttactctttaaaatgcgtttgaatcagttttacaaggaagcggtagacacctagtgccaccaaacctcccaaagtattggtccataaatcatctaactcaaagacacgattagcatcaatgagaaggtctagaatgacttgtccaacctcaatcgtcaaagacatgataaacgtggctaaaaggaccctttgccaagacctgaatctggggtacaaggctaaaagtcctaaaatcagcggactcagcaagaaaatattggtcacattttgcccaagcacaaagacaatctctttaagactatccaactgataaaagttggtcaaactattgaatggggtcaagaggaccaccacacgaccaaaatgttgaatcccaggagtttcaacaccttcaactagcccgtactggggtgtccaacataggagcactaaacaaaggagataagcacaaaccaaaacttggcttgcttgtcttccttttagtgtcagttctccatccttatctacccaagtcgtcagctgaaacatcttatttaccttctgatttaccagaagcttctgctacggccttttgacggtcacgtttcatagtgtttgaacgcaattgtccacaagcagcatcgatatctgtaccgtgttcttgacgaacgacacagttaaccccgtttttcttgagcacatcgtagaaggccgccacacgttccttggttgaacgactatattggtcgtgctctgatactgggttatatggaatcaagttgatgtatgacaacttacggattttcttagtcaaatcagccaactcttgagcgttttcagggtgatcattgacctcattaagcatgatgtactcaaaagttacacgacggttggttgtctggatgtaatactcgatagcttcaaagagtttttcaagtgggaacgagcggttgatacgcatgatgcttgaacgaaggtcattgttaggcgcgtgaagtgatacggcgaggttaacttgaacaccttcgttagcaaattccttgatttttggtgccaaaccagatgttgatacggtaatgtgacgcgctccaatggcaagaccattatcattgttaatggtacgcaagaaacgaagcacattgtcatagttatcaaatggctcaccgatacccataacaaccacgtggcttacacgttcaccgtcgccacgatcgtcaaagtatttttgtaccaacatgatttgcgccacaatctcaccagcagtcaagtcacgttgtttcttaatcaaaccactggcacagaaagtacaaccgatgttacatccaacctgggttgtcacacagacagacaaaccatagtgttgacgcatcaaaaccgtctcaatcaacataccatctggcaattcaaaaagatatttaacggtaccatctttagattcttgaacgatacgttgtttcaatgggttcacacagaaattctcattcaatttagcaatgaaatccttagaaatgttagtcatttcttcgaaagattgcacacgcttcttgtagagccaatcccaaatttgagtagcacggaatttcttttcaccgtgttccatagcccaatcaatcaactcgtcacgagtaagaccataaatagaaggtttgtagccttccatatcctctaacttctgacgtttacggcgttctggttttgcttgtgttgttacttctgacatagtttaatttcctttttttctgattgtgaaatgctgaccatctgacttggtctggctttgtttcttcgatggggtgttttgacctttagattttggagcttgcttctgactcttcttgaagttaggcttacgctcacgaccaccgtcctcggatctagatttgaacttagggcgacgcttgattttctcaaagcttggaccctcttgatccctatctcttcgtttggacttgtctggcttttgcttagcagaagctttttgtcctttattcttttgagaagcattgcgctctctagattcctgagaagcattacgacgattattagaacgacggcgcttgcgacgaggttctgtctcctcttcaaagacgattaattgcggctcttcatttttcaaaataaagtaggcgcaaccaaaggcacagtattcacgcaaatactccgacaatcggctaatgcggtctgtcttacgcgtattagggcgctcgtcctcgtaaaatcccttaaggcgaagctggtcattagaccagtccccaacgatataatcatacttgagcatgatttcagaaaaacgttgcccaaaacgggtagcgtctaaagcatccttgtgattttcaagaactgtaaactgacaggcatctgatttcagaaggtcagccacatacacaaagtctggccctggatatttattataattaaacatttctggcaagatttctttacgcatgtgccatcctttctgatctctcttattttctatcctgatgctgtaataatgtctctatatcttatcccaattggcaccattttttcctaaatacttggccacaagttcccttaacaaatctggaaaaagaagagtaacttccttttccttaattgtagggaagtaagaagcaaagtagtactggtccacaaggaccaaactaaacttctcattggaatctacaacccttctattatacaacaaattaccgtttttgtaagcaaaattccccgtgattacttcaccaaatgtcttccctctaaatcccatacctttaatagcctgatttttaaggagttcagccttagtaaaaacttcctgacagatttctttgagttcttgtcctgtcacgactagacgtgccatccgcatctgatgaggaagggcttcttgcaggtctgccatggtcactttaggacccaaagttttcatgatgagtccagtatttaaaagtgttaattggctatgagtctcctgacaaacagcctgtaaaaccaattgacaggtctcatcaaaatctagttctcgacctagattagctacttttttctgagctaaacgacgatggccttcctcacgcatagccctgataaaggcttcgtcctccttgtctaaatccaagatgtaggacttggtgggaatagcctcaatctgacattctatcaattgcccattttccacagtaaggtcaatacagccaagataataaccatatctgtcagcagctgctaaataggtttcattgactaatttgccctcttcaaaaaggtgatgcgtgtggctcccaatgacaaggtttacctgcggataagtctctgcaatctgctcatcataacgtacacccagatggctgagaacgacgactatgtctgcatcccttacctcagggcgagccaaatcctcttccaaccgagccataggctctaacacctgccaaccgttgggagcataggtaatgtaatatgggaaggtgtaggccaagaaagcaatgtttgtacctgctttagttttgtggataagatagggcttagcccattcaggctggctcccctcatccttgagatttcctataattggctgaaacttggcctgctcataaagacagtttagctcatccttggccagaccaatcccctcattatttccaatagtcgcatagtctatccccaactcattcatcagggctacattaaaacgcccggctgtcgcatcagacaagggatgggacttatccacattgtccccaagatctaccttgatcaactctctatctgtctgactcaaatcatccacagctcgcttgagttgtggatactgttcaaaatgagagtgtaaatcattaatatgaagaattcgaatcttgtctttcatgactcctattgtagcacttttgctataaaaaaacttgacaatcattctgccaagtttttacatgctatttttcaaacaggaacgtattcctagttaactttctttttaacatattcttctgcgagatgatagacgtcatctgctagggatatactgacatagatgcacacaattgagaaaatttctcctctaaagtgttgccaagcaaagaatataagcccataaattagtagcgcaagtactatttggccaaaaaattgactcagtaatcgcctaataacgacaaataaggccataagtaatcccatctttaataccataaccaataccctttaaggctgcaccttgccaagtacctgtttgaataccacctttaatggctcctccaacagccccgacgcctacggcagctgtagctccccaaaaactacatgctccacccttaacagtagaaagatcttcggaattaagtgagttaaaattgttaatgatttgtgttgtcattaaaacaacctcctttaaaatattttttagccttttctcaaaagctatgattgtattatagatagaaagccaacaaaaaagtagtgacataaatgtcactacctgattttgagagttgactcaacaaataacctcaaacttacacattattttactttaaacggaaagcttcttaaaaatggctgtgataaaactatttaaaatctgtcatagtttcagttcttaagatagccaattattttgcgagtgtagtgagcatatactgagacttgtcgctgtgataatgacgactaagactttgtagtcataagcgttgggaagttttgagaccttaagctcaaaagaaaaatatatcttcaaactaaataaggtcttttgagtttccaaaaagtttgataataatcaaaaaagctgaaacactttggtttcaacctcttgaatttttaaattaaaatttgctctcacctagaagccaatacttagaaactttgcttcttagctttacgctcagcacgccccttagcacggttagccgcacgacgctcacgtttgcgtttttcgtcaaccttccactgaattttcttcttgtagccaggcttgatttttttctttttcttcttaaccaaaccgatcatttccgtatcaagtttttgataggctttttcacggttggcacgacggtcacggtcataagtatcttgaaactcgccgtccttatagactttagggtcaaaggtaatccccatcttttcaagctcacgaatatctgagtcgtcacttggttgataaagggtgatagctgttcctgacaaaccattacgtcctgtacgccctacacggtgaacaaagaaagacaaatcctgagggatagcatcgttgataacatgactaaccccttcaatatcaatcccacgcgctgcaaggtcagtcgctacaatgtactcaaaatcaagcttcttgacttgattcatgatacgcttacgctcacgtggtggaatacctccatgaattttggcaaccttaagaccatttgacactaggtagctgtgcaaatcgtctgcacgttccttggtattaacgaaaatcattgccaggtatggttgcatccccttaagcatctcaagaatctgttcattcttgttgcgacccttagtagataccaaccagttatcaatggtatcagcaataactgttgaagttttgatttgttccatgacgggattggtcaaatacttcttcaagaatggctgtaatttttgaggaatggttgctgagaagaccaaaatttgcacttctttaggaaggcttgccgcaatcttgtccacagtatccaagaatcccatgtccatggtcatatcagcttcgtcaacaacaaaggtatgggccttgtggatagccaagtcaccagacttaactaggtcatagatacgccctggtgtaccgataacaatatgaggttgggctaccttgagtttctcaatctgacgttgcttgtctgtaccacccacatagttaacaacacgaatttctgtatcagagtgtttagcaatctgttttgtcgcttggtaaatctgtgtcgccaattcacgtgatggcgctgtgataacaacttgaacatctccactctttggattgagtttctcaaaaattggcaaaaggaaggtatgtgtcttccctgaacccgtctttgattcaccaaccaaatcacgacctgaacggactacaggaatcaatttctgttgaacaggtgttggctccttaaacttaatctcgtcaagagcctcctgaataaatgttttaaaattaaaatctttaaatgacatgtttatttacttcttttctatctagtctatccctatcattataacaaaaaaagagcatttctgctcctttcatttatttcataacgtttccaagaaccatccaaagggtaatggcacttgcaagtgctccaactgcccaaaggaaagcatcaaccttccactctgaccatttgtcgcccttacctgaaagaccacccaattcgaggtgatggtggaatggggtcatacggaagatacgacgaccttctccatacttacgcttagtgtatttgaaatagctgacctgtagcatgacagaagctgtctcaaagacataaaccacaccaatcaagagtagggtccactctacacgtaaggcaatagagataactgcaagcatagctccgagtgacaaggaaccaacatctcccataaagaccttggctggcttgtggttaaagacgaagaagccaagaagagccccaatcatagtgataatgatggtcaagatagcgaactcacccttgacaaaagcgataatcccataggcaatcaagctgataaccacagagatagaagctaaaccatcaataccgtctgtcaagttcacagcatttgagaaaccaacaatccagaataggacaaagagaacataaaagacaccgaggtgaatggttaatccaccaatagctaggctatctgtcccactaggaagtacgtggataaagtagaaaagcaaacccgcaataatctgcaaggccatcttttgccaaggtttaagtccctcattgatttgacggaaaatcttaaggaaatcatcaaggaagcctatgattccataaatcaaaatgacaaagagaatccccactgtggcaccataggcttggtgtccctcgctaaagacgtggaagttgaaaatcaagctaaccaagatagcaactactaggaagactgtccctcccatagttggcgtcccagccttagccaaatgctgcttcacatcttcatgcatttgttggccaccgattttcttgattttatagtaagtaataaagtgaggcatggctagcaccgtcaacacaaaggcggccacgcctgctatcagactcatagtcatcttagtctcctaaagtaatggtaatcttcttggttttagacagggcttttcctgccgcaacactttgtttggtaacagtccctgacttgccacccttgtaagtaattttaatgcctttccatttagcaaaggtttcaacgttcttcttggtccaaccatacatgtctggaagttctgtgaagtcattggtcatgataagaatctgttcattagccttaatattggctttggcatctacagaaaccttctcaatcttatcaccaacacccaaaacaatcggatgaatcaagttttgacgaagggtgttagctgtctcacctggacgcttaccgataatatcgccagtttgatagctcgtttcttcggtcttttcactaccttcagaaacagaagtatctagggtgtcgcccatagacatggcttcttccaaaatcgggttaaccacagtcgcatagaaattattatcccaggtcttaggctcttgaacagtcacatacatgatgtattctggatcatctgcaggaaccatggccacaactgagttgagagtttcattggaaccaaccttatacgttccagtcttttcatcggcaacttgggccgtaccagacttaaccgctacatcatagttaccaaccttgataataggtgccccttcagatttattgtaaagggtaccgaactctggatccgtaccaacggaaatcatatagttacgcgtttcagaggcagcctgcttaggaactggcttaccgataacttccttcttagctgtacgagctgtaccttggttaacatcggcaacttgtttgataaattgaggttccaacatgataccgttgtttgaaatggcggtaaaggctcgaagcatttggacctgagtcactgaaatcccttgtccgaaggatgattgtgctatattaacagagtttcgagagacaacccctgaagattcaccgaccatcccaaaacgggttggaagaccaaatttgtaaagagataagtagttagaccaaactttgtctcccatctcttgttctaacatggtcataccaacgttacttgaataagagaacccttgggcaaatgacatggtacgacctgttgagataccttcattgattgaccagtcattaatttcaacgtcgtcaaccttaataccattagcattactgtaggtcgcattcgggttgaagcttccattgttaatagcagctgacaagagcatgaccttcatggttgatccaggctcatactgggcttcgtaaagacggttaacccagtcataattcttcttagcctgtccttcaagggtatcagaattataagtcggacgttgtgtcgtcgcaagaatttcacctgtcttagcattaacaactgtcgctgaagcatttaccccttgcgtctgctccataaaggtatccatctgcgtttctaggaaggtttgaagaggcgctgacaaggttgtatagatgttcttaccatcgatagcttccttggtaatggtttccgtacctagaagcgtattaccgtttttatccttctcatagatggcttcaccatctgtcccagtcaagaggctattgagcgagcgctccaaaccagtttgaccaatcaaagaataagagccgtcttttttattttcaacagcttcagcacgaccaagaaactctgacgcgaaggtcccattagggtacatacgtgacgttgttgcctcaaaggccatccccttaattcccgcatctttaaaggctttctctagttcttctttaacagagtaggtgattcccttcccttttagtccaaatgaaacctgataggcacccttggtacgcaattgggccaaggcatcactcttttcaattcctagcttatcctttaaaatatcggcaaccttgtcaaactgactatcttggacatagagtttttcttgagttgctgacacatagctggtcgacacgattgcgtaaatggcataactggttgaatcctcagccaaaacatttccatttcggtcataaatcgttccacgcttggcagccactgtggtcttagtgttataagacttagcagcttgggtcgacaaatcgacaccaaacttactgtctgtcccgataatcacgacaaagttgataataaagacgaaaaagataaagatgctgagaaccataaggttctgaccaacgtgctgtcggttctgggctggctttcgcctatccctaacgacatagtttagaaataaatgtttaagttttcttaatctgttcattagctatttcacactcttaatactatcgttattaatagacaagcctgccttattagcaatctctttaatacggtcagagttagtcaactcattaaccgcctgcttagcattgttaagctctgttttttcatcactaatcttgctattaaggtctgtgatttgttgcttgatagcctgattacgcccttgtaaaaatacaacagcgatactcatcacaatagctgtcaaaacaattgccgaatagaaggccttttccatacgcgtcataaaacgaatatggtttctaatggctctattaacaatctgatgttccttattttccataattatttcctgatttttttagccacacgcaatttagcagaatgcgagcggttattagcttctaattcttcctgactaggtaggattggcttacgattaactaaggccaccttaggctggaggtcttcaggaataaaaggtagacctttaggcacatctaccgtactggcttccttgaaaagctgtttagtcaatcgatcctccaaagaatggaaggtaatgaccgaaatacggccatctacagcaagtaaatccaaggcctcttgaatagactcatccgcagcaccaagctcatcgttcacttcgatgcgaatagcttggaaaatttgcttggctggatggcctttcttcttcaattccttagcaggcttagctgatttaatgatttccgccagttccgtcgtggtctcaattggtttaacctgacgagcctgttcaattttacgtgcaatctgtttagagaacttgtcctcaccatacttgaagaaaatacgcaccaaatcgttgtaagggtaggtattgaccacatcataagcggtaagactcgcttcctcattcatgcgcatatctagcttagcatcctgtttataggagaaaccacgctcacgctcatccaactgtgggctagagacacctaagtcatagagaatgccatcaatttcagacactcccaaggcttcaaggttggacttgagattacggaaattatccttgatgaaagtcaccatacccttatcaatatagtccttaagacgcacttgagcattatcaatagccttttggtcctgatcaaagcagtacaaatgacccttttcagataattgcgacaaaagataagacgaatgtcctgcgccacccaaggtcgcatctacatagatgccatcgggcttgatatcaagcatatcaacagtttcgtgtaaaagaacggttacatggtgaaattcattagtcataacttttattatagcacaagaatggagaaattgtctcgttctgtaagttgacaggatagtaaaaaagccagacctgtggtctaactctttagttgatatatcatctgataagattaatccactctgtaaaaatagctttcctcagatggcactccattcgtcgctagaatacggtccttactattatctcccgcatcacttgcatcgctaacgcccttaggacaaggctgaattggagtattcccaactggactagaatcaacataagttaaggtatatataccagacacatactgattggatgagactttgtcgataaggtaagtagacccccagagttccaactgtccatccgaagtgatggtgatggtctttccatttgaagatttccatgtccctacagctgatttgtaattgccatttttgaattcatcaggcttgaaggatgatgaatttgtttgaatttgtgacgatgttctaaagttagtattagtttaggtccttccaatcccaattagtaagatcaacctcatctgcacccgaatcactgtcctctttttcaagagactgaccatcactactaaatcgatagccagcacctccaccagtcatagcaccagcactaccatagtagctaaaggtgttatccatgaggtaggccaatgtcatacgctcacccaacatgcccagttgtggaccttctgtcagacgaataacctgaccactatccttagagatagtgtaaatatccgtaatcatatgttctttaaagagtttacctggcttaaaagcaagaatcaactcatcaacaccattaccatccaaatcacgataagtatagaccgttgaggcaggacttgtttgagaattagcataggtcacaatgagagaattaagtgaggcatccgtttggttgttgaccacagccgtttggtatttactaatgatgctatcataggcagaggtatctacctttttctcctgactagagcttgagctagtacttgtgctagagctttcactactacttgattgtgactgctctactgatgaagatgaagtcgtggaagtcaagccattttgttggtttgaacaagctgctaataggactaaactagataatcctgttactaatgctaaaactttatttttcatttctaatcctaaattccttttctctaacccttattctgttgtcccagagctaacatctgcgctgtaggcaggtgctgtatagcttgaagcatcactatgtgactctgtataagttgttggtggcacatagctatactggggcgcttgataagtctcttgtgctgaagatggtgatggtgtaggcgttgatgctaccgcaggagttgagcttgcttctgtctgactagctgcttctaccgttgaacttgctgatgacgattcacttgaagactcacttgaggttgaagaagatgacgaagaacttgagctcgatgacttagatgaagccttgggtttactagacgatgactgcttagtagctaccttgacttggaccttagcatgattgtgtgcaggctgcaaaaagacaattgccaaagccaaaagaatagctggtagagtaaatgccaaaataaggtaacgtttttcttttaaatgacgaagtagtttcatagagtattcacatttcttaaatatatttttagtatcgattagtctcagataagattatatcagaaatattaaaatgtgcaacattaacataaaacttttttaacatcaaaaaaaaacaactcaaagagttggttgattgccattattgttgtggattattgaagttgttgactggcacttctacttttgttggttgacatagtagaaaaatgaagataaaaataccgacaaagggaattaaaggaataaaaatatacggccaattatagccagcatcacgcaaacgacgaacagttatagcaaggccaggtaaaactgtagcaataccataggcaaaaaagatgagtagtaaaataactgaaatagtaaatacatccattgaccctgttgcagataccattctttcaaacactgcatcgagcaaataataagcaaagaaaatcaatacatgtgccaaatatgcaaaccagtaatctgaaggtgttgaacggcccgtaaaatcaacatagcccttccaaaattttttgtaggcttcaatcataataaaatccccctttttatgttactctcagtataacaagagaagagaagcttgacaaatcaactaaaaaacagccatactaggctgttaagtcgttattattgctgtggattattgaagttgttaaatggatactcaactttagttggtttacatagtaaaacaatgaagataataggacctacaaatggaataaatgtaacaaaaatatacggccaattgtagccagcatcacgtaaacggcgaactgttacagcaagaccaggtaagatggcagcaacaccaaaggcaaaaaagataaataggatgatgaatgaaataacagcaaaaaagcttgattctgtagcacctgcaatgcctccaaagattgccagcaacacataaaaagcaataactgttaacatatttgccaaatatgcaaaccagtaatctgaacgtgttgaacggccttcaaaatctacatagcccttccaaaacttcttataagcttcgatcataataaaatctcctcattttttgatacttatagtatagcaataaaaaaagaatttgacaaatcaactaaaaaacaacctaaggaggctgttaagtaactatcattgctgaagattattaaaattgttgaaaggaaattctacttttgtgggttgacaacacaaaaccaacagtacgatatcacctataacaggcgcatagcgtaagaaaatcaatgcccagtgaaaaccggcatcacgtaagcgacgcacctgaagggcaatagatggaatatagttagcaaaacaatatagcattgcaaacccatacagtaagctgagaataacatgataatgactattcggactatcaaaaacagttacaactataactatgctaaataaaatgatacctacaatagtattcgctaaaactgccaaccaatagtctgagcgagttgaacgtcctgtaaaatcgacatagcccatccaatactttttataagctttaaacatggcaaaatctcctaatccttgatactaccagtatatcagaagacctgtcgtctagcaaaccaactaaaaaagctccttcatggagctttatgggttattctctaatttgtccttgtccgttaatatagaacttggttgacgttagggcctccagtcccattggaccacgggcgtgcattttttgggttgagattccgatttcagcacccagtccaaagacgaatccatctgtaaagcgggttgaggcattaacatagacagctgcagcgtcaacatcatcttggaattgctccgcacgactgatatcctgagtcacaatagcctctgaatgcgatgtcgtgtaagtattaatccatttaatagcctcatcaaggctatctaccactttaacagacataatatagtcaagaaactctgtcgcaaaatcttctggtgaagcgggtacggatttttccataagtttcaaagccttttcatccgcacggaactcaacagcctgaacttttgaaatagctttttccaagttaggcaagaagtcttccgcaatatcagcatgaacaacgagagattctgcagcattacaaacacttggtcgttgggttttggcattgatgacaatctgtgtcgccatatctaagttagcatatttatccacataaatatgacagttaccaacacccgtttcaatgactggaactttggctttttctttaaccgtttgaatgagacgggctccgccacgagggatgagcaagtctacatacttagtcgccgccataagttcttctgctacctcatgagaggtatcttcaaccagctgaacggcatctgctgtgatacccgcatttcccaaagccttacgagctaccgtaaccaaggccttgttggaattgatggcatcacgtcctccacgaagaatgatagcattattggttttaaaggcaaggctaaaggcatcgattgagacatttggacggctctcaaaaatcatagcgataacacccataggaacacgcttttgaacgatttttagaccatccagattcgtatagccacgaactacttgaccgattgggtcctgaagatctgccacctgacggacaccctcagcaatccctgcgatacggtcttccgttaagagcaaacggtcttgcataatctctgaaataccattttccttggcatttgccatatccttagcattttcagtgataatataggcactctcagctactagagctttagctacctgatttagtaggtcgtttttagctgctgttgataatttagcaatctgacgacctgccaccttggcctgttggcctagtgtatcgatatatgtcatcttagtcctcctgtttaaagagtgtaccaatcttggctccttctaggacacgaaggatgtcgcgtggattttcaccattcatcaaaaccatttggctatgattttcaaaaaccatctgggcggatttaatcttactcatcataccacccgtaccaaatttactaccggcaccaccagctgaggccagaatttcctcggtaatctctggaacatagctacgaagggtcgcatcctcatagacatttgggttcttatcaaagagcccatcaatatctgacagcatgatgagtaggtctgcaccaacaatcttagcaacgatagcagacaagcggtcattgtccccaaacttagtcgcatgatccatttcatctacgctgacagcgtcattttcattaacaactgggacaaccccaagctcgaagaggctctcaaaagcattaatggcattggccaaactctcgggatactcaaccacatcacgggtcaaaagcaactgagataccttggtttggtaatgtgaaaagacctgagaatataggctcatcatagccacctgtcctacacttgagacagcctgttgcttaccaacttctgctgggcgtttctcaaggtctagaacattgagaccaaagcccatggcaccagaggatacgaggacaacctcaattcctttattatgcaagctagaaatgacaaaagctaattgatcgattttttcaagattaattttccctgatggtaaaaccagagagctagtcccgattttgataaccaggcgttttactgagtcaaaatttcgtttcatgtttatgattatacactaaattcaggtattttaacatatataatgcataagtttacatattaaggattttcagtaaaaaagaatccctccaatcggagagactctttaaacagtttgttctaggcaaaaaacatggctctaatacgtttccaacgtctgcgatcaacaaagagataaacgattagggcaactaaagctataagcccagatactatagcattgactactagggcaatccagaacttacttgcaaagaagacaatacctcctagcaaggcagcgatgaaaattgtaagaataaagatacccatatagagccactgtccgccacctcgattgaagagctgggtaacttcctgccaattcacttccaacaatttaaggtcacgttcaaagtaatagccacctacaagataggttgttacgagaaaaccaagagtgaaacttgctaccaaaataggatggagatgagccaagaatattaaaccaagccctcctaataagagggaaacaccgacttgcaagccatagaaaagccagaacttttgacgaagatagtcacccgtattgattggtaggctacgaataaagtcaaagtttgtcccctctaaggatgttgctacaccaagaaaacttgttggttgagctgaaaagaaaccaaaggcaattccgaccaaaagcaggagtccgaaatagtctggacccagatctttcaaaaagaccgcacccccacctaacatgatcatatataagaccggcaccacataggtattgataatgagggttgaattccccaaagtagataaatgatggcggatcaagacctgtctttggcttcgagtaacagctttggcctgaggctttctagccttttggttataaatggcttcgtggaaataacgaggcattctgaccttataaaaccaaaagcccaagataagcactacaacaagaggaagatagaaatttagcagagcctctggagatagaggggcagctacaacatcatagtaacctcttagataaggcaacaagggaaaatcgatatgtccagaccccttaatataaccattaagaaagccaaccatcatgatagggaacataatcaatagggttgacaaggtcatcaaaatggttgaatagagctttttatgagaactgcgaacaatcagcgttccaatactattagacagaatcactgaaaaaacaagattgataaagagagaaacgataaaggtcagaagcccaacgactatccccaatgggccaataaattgccagtaagctagaatgagaagactaaggataggtaccatgaaggtcatcccaaccatagagcctgacaaggtcttggccaaaaaaacttccgctggcttcaagggaagaggcagataagccttgctatccttactgtcataaaaggtactatagagagcagtaaaggtctggagaagccccatgattgaaaaagtcaagagatatagggttaagactccaggattggccttataatcgacacctacaaaaagatagctatagacaaccgtaaaaacaactagaatcaagagttgctgtctaagcatggcattaacgatggagaaattggcttttttctttttctcctgacgtttctgtaggttagttactgcttgaggattagcgtagaggagattgattttaaaaagctcccaaacatggttccagttcatgactatacctcctcaatcttacgtccagccatttccagataaatagtttccaaatccttgtcagggtactgagacttcagttcagctagagacccttggaagataagttttcctttcttcaaaatagcaatccgatcacagagctgctcagctacacttaaaacgtgggttgagaaaaggacactattaccttccttggcatgatgacgcatggcttccttcaaatcataagacgcctgtggatccagaccagtcagaggctcatccaaaacccaaatctgtggattaaccaaaagggcaccgataacaacaaccttctgacgcataccatgagagaaggaagaaataaggttataacgactttccgttaggtcaaaggtagccatgagattagtcaaacgttcctcgacttgactagcttccaaatcatagatacgtgtcaagaagtaccaatagtcattggcagtcaaatttaggaataggtccggtgaatctggcacataagcgatttttttcttgatggcatcacgatgttgactgagggccatatcatcaacgtaaacttcaccgtagctagcttcaataatagatgtcaaaatggaaatagttgtggtcttaccagctccattatgaccaatcagaccaaaaatctcaccatctcgaatctcgaggttaagatctgagagagcatctttgtcttcataacgtttcgttacgtgttcaaaacgaatcatcttttatcctttcttgagaatctatttaacaatagtctcattttacactttatattagattataaattagagttattaccttgtttttttatgaacaatactctaataatgccgacaataggtttagataaggctatttcgttaccttctcatttattgtatcatttcaaaggtacaatttcaagaaaacgtttgtaaaaacgagacaattttgcattcggtctttgataatgctaaacttatagtatttagaacacataggaggaaatcactagtgccaactggaattatcatcaactcgctatctattatcttaggaggaattgctggaggactctttggagactatctcagagacgatttcaaggacaatcttaaccttatctttggcctagcctctatggttatggggattagtgctattatgaatatggttaacatgcctgcggttatctttgcagtagttatcggtaccatcattggactggccctaaagtttggaaacctcatcaacaagggagctgtgcttatggaaaaaggcttgtccaagattacactaagcaaacaaacagggttagctcacgatgagttttatgcgcagctcttgacagttatcgtccttttttgtgcaagtggtacaggaatttacgggagccttgagtctgggatgacaggtgatgcttccatcttgatttccaaatctatcctagatttctttacggccatgattttctcttgtagtctaggctacatcgtctccatgattgccattccacaatttatcgttttcttcctcctctttgtgagtgctggtttcattcttcctctaacaacaaaagccatgattggagactttaaggcttgcgggggcttcctcatgattgcgactggttttcgtattatgaaactgcgtcaattcccaacagcagatatgattccagccatgattctggttatgcctatttcctgggcctgggtcaattgggtggtgcctttgattagttgatattaggattaaactaaacaaataccgtcagtctaatgttggcagtttttgtctctatttattgccgttatggaacccaactattaaaaattagtcatttttatggtgtttaattctaatttttctaaccttgtttagactaagatgagtttgttataataacccttgtaggcctaagcaacctacaagatactttttttcataactatttccatcctctaatattttaacgaacttacaatactgatggaaatctatctgaaaagactggtgtgtgcacaccggtcttttttggtgggattgagacacaaaaaaccactctttcactctgaaagaatggttatgctatagcttatacttctacgacttccaagttttttccacctaggagaataaggtatttatcaatcttatctatttgataggcttggctgagtgctttagcatagaggctcatttgccctttgtagcggtccttaagctcaccaggttgagtgaagcggtccgtcttatagtcaaagaggacaatacggtcttcaagaagaaggtagccatcgataataccacggacgacaaagtcttctttactagccggatcttctgccaacattgcaaatggcgcttcacgacgcaacttatcacggtttgctagaatgagcttcccaagttcggtgtcaaagaagcctaaaagtttttctaactgcacacgcgccttgacttgatcatctgccgatactagacttagcgcctgagtcagatcttgaagggtcaccgtatcagaaagaattaagcgttgcatgagttcatgggtggctgaaccaactgcagctccagtgaccttcgttttttgcccaaaatctggaagttcaaagctagtggatgtctccagaggttgtacctcctctttcttgtccataatatccaccccttcagtatccatgacaggttcgtagaaggctttgagctggctcggcgtacgcacagatggcaggtcaatcgctggtgcataaagttgattgagtttttcaacactttctaagacagttagggcacgcttaatgtcttccgtctgacgattgttagatagatcatcagcatctactgttgcttgaacttcaacctgaccaatagcctctggagtcaactcctcagcctcaacaaagcgaacagtaaacttgagatcctttctcataaaggcggtatccaaagccataacccaatcctgataagtagcgatttggtcacgtagagctactggtaggcgattattttcaacatccgtgccaaattgctgggtcaatttctccttactgcccttaccaactaggtagagttttttctctgcacgggtcattgcaacatagagcagacgcatctcttctgagatacttgctcggcgttcttccctacgattttcctggaaggttaaggtctcgagaacaacatttaacttaggcaaattagtgtttatctggtctttgaggtcagctagatacttaatgcctagtcctttttcacggttaatgatgtacttaccacttagtccatccttgctgtgaccaatgaacttgcgattcatctgcaagacaaagacatacttgaactctagccccttggacttgtgaatggtcatgaggctaacggcatttttgggaaccaagtctgtcacttcctctaggtcgttaccgctagaaatgatcttatcaatcatgccaataaaacgagaaagtcccttaaagccagtcttttcataggcattggcacgtaaggcaagggcgtagagattggcctggcgttgctcagctcgtggaagactgccaacataatcataatagaaacgatcgtcgtaaatcttccagatgaggtcatagagcgagtgccacttactgtaatcacgccaatctgccagagtctcaatgaagagagtcaacttggcatcaagtccttgcgtcacgacttctggatgaagtcctgatttagtatgagctgcaagaagcttgtcatagaattgtcctttgtcagcctgaacagcaatccgagccaggtcgtcctcgttgaagttaaacatcggtgaacgaaggagggcaaccaaggcgtagtcattgagaggattattgatggcacgaagggtatccaacataatcataacttctagcgactctaggtagcttgacttgtactcgtcaggtaccaagggaattccgtgctcctcaaagcttgccatcaagtccagataggtgttacgggttggtgctaggagggtaatgtcctcaaaacgtacaccctgctcgtgaagtttgatgatttctttgataaccaaggaaatctcgccgctactgatgggttgatcagcaccttcttcgtcaggagttacactcgcttcatcactattgtaaatcagaacctctgtctcattttcaggatggggttctttttgcttctcgctacccgctaccagcatatgagtcttgtcatagaggatgtccccgatttcctggtccatgaggtggctgaaaacaccattagtcgcatcaagaacctcagattgactacggaagttctctttaaggagaatcagcttacctgcatctggattttcaaggaagagctggaacttaccattaaaaatctgagggtctgcctgacggaaacgatagatggattgtttgatatctcccaccatgaatcggttgtgtccattagataggagttccaacatgcgttcttgggtatggctattgtcctgatactcgtctaccatcacttcatggtaacggtcacggtagctggctgccacctctggattttcctccaaaatacggatggcaaaatgggcaatatccgagaattcaaaagcattttcctgaatctttgcctgtaaatactggtccgaaaaatcaagtacaaaggcctgaagcaactccaacagaggtaggatgtcatcattatgcttggtcaaaacctcgaggaccgttagctgggtatcaacctctcgcaactgggccacaaactcatttttggtcttgttgtaagcttccttgtaggccttgagttcctcgtctttaggacgggtcatattggtcaaaccagtccctcctgacaaagtcaagagttgtttgagcaggtcctccatatccgtttggtcattggccaaggctccttcaagaaggctaatggcatccgacacattattaagatacttagccttggcaaattcacgctgagctaggcctagatggtctcttaagaagtctaagaaatcagccaacaagccatctttgagaccctctaaaagctcagctttaaccttgtctggattggcctctgcctgcccttttaaaagattttgacgtagccatttttcaggacctgcagtagcctgagaaaagttatagacatcgtaaactaaatcacgaaaagccttactagtcttgccatttcctgcgaagttgcggaccaatttttggaaaagttgggcatcctttccttgcatgtaatcgttgaaaagatcggcataaacctcatttttcataagtgtctgctcggcaggatctgtcataatgcggaaaataggtgacacccccaagagatagccatactgattgaccaatttctgggtaaaggcatccatagttccaatatcagccgttccaatcttggcaatctgatctgaaagaaaggcacgctcttcatctgtctctacctgtcccagctgctctgtcagacgtttttccagacgctcttttaactcacctgcggcctttaccgtaaaggttgagataaagagttggtcaatgccaacaccacgtccaatcatatcaaggatacgctcaaccatgacaaaggtttttcctgatcccgccgaagctgacacaagaatattactaccattactgtaaatggcctcaatctgctcaggtgttaacttgcgttccttgtcagaagctgcttcttgggcaatgcgttccttaatctctgttggacttaaaaaagctttagtcaacatggttgtcctcctggtctttgttgtctgctgtcacagcttgatcagtgactggaaagaggacgattttttcagcaacttgcatctgattcttgtcctcatcttttgccatcagctccaaataggcttccttcttgcccctacttggtaaacgcaggagctttcgagcctgtcccatgtggcggtcggcctcaaaatgagtaatagccttgatttgatccccttgaacagacttgccatcctcagtataaggattgacagcaaaattcccgcttcgaataacttcagcagcacttgtaaagagcttaatattgtaagcgagcaaggtttctaggtcctccttgtcataggtgacagtcttttgtaaatcatagtttccaccagctagatgctctgtttctgaagccacaaaaagtcccttataggttaattccttatgagcctgagctgctagcttatccagaccaaactgagctaggttaagctgtgggtcctgcatgtgaagatacatggcaccaaaaagctgatcagcatcaaccttataggtctggcggagggcttccagataggttaccaactgtgggctgaggccattgtagaatttttgaatgtcaaagacatttttacctgacttgtagtcaacgacacccagagccccatccgttaaacggtccacacggtcaataatccctgtaatcttgatgctatttgctaaaagcaaatcaaacttggcttcctcacgctcaaccttaacagccgcattatcacgcaaaacactggcagttgaacgagcgatatcttctaaaatctgacgagacaagcgactctcttggtcctctgcatagagaagttcaaagggttgttcctgattggtctgagcaatagccttttccaatttatcatcgaagttttctggcgaagaatcccccataacacgctcaaagacacggtgcaagtaagtcccgtggtgtcgagcatctggatggatggactccaactcttcaagccctaaaacataacgcaagaaataaagatattggttgttatagaaggtcgtcagagccgaggctgataatttcagtggttcttcccccggaaagaccagctgcatgacctgatcatcaaccttggtcgtcgtcacatcgtcaatcacatttggaatcaagacttggtccttatcaagtcgcttacggagataacgcacagcaacggaccagaaagtctgcgtttccttatccaaatcagcatctagatggctactgttaagggcaatgacagttgatagaaggtccttgtagttcccaatctggtcacccttagcctcgaaacgattacgtcccttttcaaccaaagaaagaccaaggtcaagcagctctttcaaataaaccgacatgtcatcctgcgtctcattgagaatttgtggctgactaagcaccaattgttcactagccgcattaaaaagtgacatagccacaaaatgcccccgctgactattgctctgcgtaacaatatccaaactcctgtcttcatccgtcgcctcattgatacgactacgttcctcgtcagacaggagactcttattttgccctaccttaggaaaatgtgactgggtcatccccaaggcaaaaacataaggagcagagtgtggttgaatcaaatcgtatttcttcacattgaccacatcgacagtagctggaaccgtacggtaatcataggccaacattcccgaacgcaaaatggacaaaaagtcgtccactgacagagtttcttccccaaaaatagtctcaacctgctccaagagttgtgtgaaagccttccagacctgttcgttctgttctttttcggcctcactggccttggcagtcaaactagccatctgacttggcacttgcacagcctctaaaaagaccactagtttcttgagtagactagaacccttttgtttgcgactattaagcaacttgtccaagggctctaccagttgtgagcgcaaggcattaagctggtctaaatcatacttatcacgactattggccgtaaaatcagacaagaacttgtgacgccccttgatgtctgcaaaattgacataatactcaaaaagatctaaatcctcttgagcaaaaccgccatagagaccggattttacgagattaagcaaatcctcagcacgataattatagcgcttgatacgttccagcgaatccacaaactgcaccaaaggatggctagacatggtttcttccttaccgaaataatagggaatatcaaattttcggaaaatctgccccacctgaagcttataactctcctcatcaccaagcaggaccaagatatccttatagcgcttgccatctgctagtaactgacgaatactcttggcaacctgagccacctcttccttttggttgaccacttcccatacctgcaaggcttgcttgtcctgagcagttagctgctcatctaccgtactaaaatcatgacggctctccaaaagacgactaatgcgcgcaaaagaaggattgccctctttgtctgtcgtcacatagtcgggtgtcaccttataggtctgagccaaagttctcaaaaaatccactgaggcctgataaacattgccataaacaaagttagccctataagctttttgactggcataagtcccaatgacaatctggtggcacttatcattcaagagagcaactagggcctcctcctcggcagagaaacgcgtaaagccatcaatgaccaaaaccgtgttacccagtgccttatccagatggcctgaggtaatttccttgaagaaggcactaagttttgattgattgtcaaaatctcctgccaacaagagatcctgagccgcactgaaaatcctgagcaaatcctcttgtttttcaacctgatccaaatgctgcaaatccagaaccgtcatattagcctgctgcaactctttataaaggtctaccaattgattaataaagttactatccttgcgcaaacggccataaaccttgagctcatcatcgcccatatgcgacaacaccttgtaaaaaatcattgccagaccagtatcatccagctgagtctttgggttgctcgtattgagaataaaatatctcgccatctgagtaaaacgagtcaccgtaatctcaaaggatgctgactgaggcaggtattccaagaccttacgctccttctcaaatgacagggcattaggggcgatataaaaaacccttttccccttttgagcatagctggttgcctgctccgtcagaatttctgttaaatcctgagacatatccgtataaagtaatttcataagacgtccctttcttgtctctacaccagtcgttaggctaaggaagaattaccattcacttagcactaacaaccactaatccttgctattataacacagaatgaaacaacaatcagactcctccctcgcccctatctcctccgatgtcctaagtttcacacataagcacaaacaccacagcaaagagccctgctttatggacctgtacctaaaaaaagagccaaatcctctgatttagctctacatctttatttaaaaatcaattcctgtttgaagaggtaatcaccactgcttgtaatcaaattggcatcactatacttcctaagaatatccttggctgagtgaaggttaagacctgaggtcttcttctggttttcttcctgcataatggcatcaaggtcaactttttcttctcgcgtcctattttccatgacgaaatggtaacttccatcctcatcatgtcgatgaaaactaaaattgatttgactggcaggtacctgcttactctcatcaatcgcattactaaagaaaatggacaccagcaaggtcaagtcaaccacgttcatggtaaaccctgaaatctcctcaggaatatcacaagtcactggaatattactacgtttagcctccatcatacgagccgaaagaagactacgtaaggggagggactgaatattttccagcttaggattatcaatgacacggaaacgttcaaactccttggcactctctctaaggacattctggtacacctgttcggcaagagcctcttcctggtcacgtacttcctctgaaaattgttccacaaccgtctgataagactgtctgtattgtaacaactcattgtagagaagatcaatcttttggttggccttggtcaaactattcaaatgcctcttttcctccatggccaaactctcttccaaatactgcctagacagttgattaagatgggcaattaggaaaatgaaagccactgcggacaagagaacccaaagcatccgaaatctcaactccacctctgaagaatagccagggaaccaactgtctaagttcacactgagatagattcccaataaataaatggccattgctagagcaacccttctagaaatctggagattatgaaaagagtcatcgctatagaccttccaacgcttcaaatccaagcccaagaaacggtcaaatacaaaataaagtggcaaaatcaaaccgtaagataagagatagaaaagagcattggaccctacctcagcgacagggagatttaagaggaggggaataaagaagagtcccaataagcgataaagtaaatctgacgtcaccactggaaacaaagtatgaaaagcatactgggtcaccgaccaggtcttccctttagcaagaaaggccaaaatcatcaggatcaagacatcaaaaaccataatcatgttagtaatattatactgaatgactacatctaacagggctaaggtcaagaagaccgtccaggagatacgaatgtctgtcattcgtttgaaaatggcacaatttatcgtcagagttaaaataagctgaatggctagaaaggcatctgtatcatagagatttaaaaaatttattcccaaaaacgattcaaacatcgaatctcctttctatatatttttttacaagtctttagtattcaaattgctgtctatagatgaacgtatcattcttaaagctaagtttagactgagggtaacgctccataatatcttcgagctgctcattgattgataagtgactctcatacgcctcgtggggcgcctcggcactatcttgcgaaagggttgtctctacagagaggacctggacctcacctctttggtaataagacatacgaactaaactattttcttgaccatgagctctcaacaaggcattgtccaagaaggtcgttagaacagctgataaatccaccacatcgatatgaactggggatataggatctggaacctccatgataaaatcaacgccaacagcatgaaactccatatacttactctcaatgacggaacgtaacaattgagaaagcaggttagaaatatctggcataaccttgctgaagggaacttcctcctcagataagttctgagtgtctccctcttgactagtagccagaacggtcttaaccttcttaggtacgactaccttaggcactccatcacggtatagatcctgatagagatggaggatatgtctactagattcctgtaagctctggaaatgacgctcctgctcctccttcaattctagaaagagctcatccttaatccactggttggcataggaaacaacaatgaagaaggctcctgttgctaatagaacgatcaacttggcataattgttaaccacttccacaggccagatgctagcaaagtaaggcatgaaatcatttagaagcccgtatgaaagaaaggcaaagctaaccccaataacaataggggtgaagtgtatacgtaagcgctccttttcctcgacctgcaaatattcataaccaataaaacggtgaaccaaaagataaagaggataagtaactaccacacatataaactctgttaaagattctggaatgcggctcatcaagtcgtctcccaaaagtaaaggaaagacgattaatgacaagcctcgtataatgatattggttgtcccccaggcataaaaactattaaataccggctctatccatggcaagtctggacgtttgtaataactaaaacaaaataaaatgagaggattaagtaaaaatttgaatcccataggaagaaggggagtcaaaacaactgataaaaggccacctaataaaagtagccaccaagaaatcttgaccctaccagctgcatgaaacatcagataattgacaaagaaaatcaagagcgtgtctatagatactagccaatgaaaatctttaaaaacagcaagtagcgattcaataatagaagtcattcttttccccctctccctttaatctgatttaagaaacttcctcaaaaatcccctaggaagccctttttacaacactactcattatatagctttttgtaagttttcacaataattaattttctattaaggtctacaatacctctaagaatccatttatttatagaagatagacttactattaaattaaagttacaaatgtaacataaaaagttgagacaattttatctcaacttttagattataaaactacttttttgagacttacttttaagcctaaagtctagtcagccttgtagtagaattgtttggcgtcagattgtggtgatgctgactgggtaatcaaaatacggtctttagtattatccgaaccgtccacaaatccctgtactgtcggaagcgttactcccttaggaataaagacaatcgctgctccggaaatacccatccttaaacttgatgtgagatagccattctcaagttttccatttgtattttcaacaacataattctcaggagctgttaaattgtccttagaaaaattcagacttaagccattcccattcttccaagtcccttctaggctttggaagttattatccttgatagcattaacatccatacctgtttgttcggtcttggtttccgtttttgattctgttttagcctctgatgagcttgatgttgactctgatgattgtgaagaacttgaagattctgagctttcagatgtgctagcactagagtaatgcttgagcaactcttggtaagcctcttgcatgtcatctggtgctaccttataggtctgaacagccttcttatcgtaattgcccttccagtagttcgtcacataataaacggtaccattagagcctagaacgatttggtaagaatccttatcttggtcaaccaagtccttatagagcttgttgtagccattataattgccaccagttttatcatcagctgaaaagtccttaaagagggctttttgttcagcagcatcgtcttcatacatagcatgtttcttatccttcaaggtataaagacggaaggatgattttgggctatagtctgcggtcttaccactattgtcattaatccctaaagcaaaggaatcaaccgtgtttttatagtccttgaagtcatagtttgagacttccttgccattgatgataccacttggaacaccagtaatatgttcatagccatccgcattgataagattagcaaggatggtaatcgtttggctgctacctttttccttaggtgccttaaatgacaggaaggttggactaccatcattgaccttggtgatgctgtcaaagctactttgaactaaaacagcatccttggcataatcagactgataaagccatttcccaaaggcttccgtaatggacttaatgtcctcagtcgaatagtctgcaatataagtggtttccttatcaccattgacatcagtcttagtcttgatatctgcatttggcttattgggatcgttagaagaagattctgagcttgcatcgctaccagaggatgaactacttgattccaaaatatccttaataatgcttttaacttggctacttgaagaactagacgaagcctcgctagactcaacgacttcagagcctccctcaacctgagtataggtgtctgattcagtcatttcaaccttcgcatctcctccaggtaccatacttggtgtgatacggatagtaccgtctgagctgccgttagttccaggcagcttaaagctcaaagaacggtcttcgccggcttgggcattagcctgataggtatctccagtttccgtatttttgacttcgtatttgtctcccttgattttacgaacttcaaaacgcaccttgttcccggtattcttatcgacaacggttgtggcataaactcttgaagacgatgtaaaagccgtgctctgagtgtattttccaagtaccatgaagaccaaaaagacaatcaaggctaaaccgataaactttttatgtttaaactgtttcatgaagtcctcctagataaatagatagccaacaacatagccaaagagagcaatacaaatcaagagcaaaatttccaaaactaaaaaccagctaaacttgagatcacccaaaccaaccttagacaaaacttgtctgaatttagaatttttctgtctgctcaagccactagaaagggcaaaaccagccttagcagcttcagcaacttccttatcacttggcttgcgaccatgctgaacttggaagtcaatcagccattcatcatattgttgcatttatttctccttcttctgaagtgtgacgaaaaagagtagggcataaactaggcaatgaagcaccaaggcccaccattgtccccagaattcgcctgtagaaccttgaaaagcctccaactggctcttagggacaggaacatggtacttagccaaactagatggcaagtctgacaagtcactagaaatcccaaaaagcttgtggccataacctagatagacaaatttttgtacccaatcaatggcttttggcaaagacaggatagttcccgacaatgaaaattgcatgatacccacaacaactgctaggataacagaggtaatctcagatttgccaaccaaggctgagataaagagggcaataaaatgcgacgccaagaaaaccaggagcactgtaatcccaacttcccaacggtaggaaccaaaaatatgaccagcgtctggaaattccttgtcaaagaacttactaaagacagagtaagataggataaagacaatggtttccaaaacagcaaagaaggcgtgaatccccatactagccaaggcgaaggctgaacgactcaaacctgagaaaaagtcacggttgaggaccgagcgttccttagaaatataaatactgttttgaaccacaatcaagagactggttgagaaaagcaagagaaagagggtcattcgagttgtttcgaaatctttcaaaaatcccttgtcttggatatagaggattaagccttcgaaagcgacaatgcccagaagaaccttcacaaaatccatgtagtggtgtttaaatttataccaacttaatcgtaatgctgcgttcataagtctccctaaatcttgtaaatacgtgttgaagcattgagctcttgataaacatctgctatattcatatccatatatttacgaatcatataaggatcgctagtcttgtattccaaaagcaactcttcataggttcctgcaaatgtcggacgtcccttagacaagaagatgatcttgtcaaaaatagccaaattttctgtattgtgagtaataaccacaatagacttgttagctgatttagccaagattttcaaggtacgtaagagattacgatcactaagggcatccaaacctgaagatggctcatcaagaataaagtagggactagggctaagaagctcgataccaatagagacacgacgtttttgcccaccagaaagctctgagatcttcttattggcaaattccgtcaaccctaaatcatccatgatgcctgcaatgcgatgctttttagtcagcttaccgctccctttcagatggtggtccgcataaaaatcaaaggtctcagatactttgaggtactcacgtaggagattttgttggggcacataggaccaagagcgtgaaccagcagtcacaggtttgccattttctaaaatacgaaattgttggcaagtcggtttaagctggcctaggagaatctctgttaacgttgttttccctgaaccagaagcacccaagataccgacaacttggccagtctccatagtaacatccaaatctgtaaagagctggttatcatttcccttatatttgaaacagatatgttcaaatgttaattgattggtttccattaatatctcctaagacataagtaacatcaaagccacaattagaatggctccgataataagaacgatgacattgatattgaagaagagaatcaagcttagtaaaatcacaaaggcgacggccgcaaagaggtaatttttaagaggtgactctttggtctgagtcaccgcaacaggttcaaaagggatttcctttttacctgatacattgctagtatcagtggccgtccccttgtcaacttccaaggcctttctctgagcctgtctgagttttcggtcgtattgtaacttctcatggtctgagaaaaagattgagcgaatcgtgtagagctcactgcgcaaacgctcaccttctttatccaaggtaccatttgtccagagctcctccagctcctcacgtaaaaaggaaagggccacgaaacaatcttgagccgacatctctggagagatgcggttactgacctctcttaaatagggtacttcctgtcctgtctctgtatcaattgctttgtagtagtctatcatgagatgaatttagcaaaaatagcttgaagttctgacaaatcttccttaaccacttcttgggtttggttgacttgtgcattgactgaaaagcgtgccacaacagtattacttcgaggatccgatactgtcacggtaacaatttgttctgagtcaaaggcataggtgacttgtgccaagagctcgcctttctgacgaggttgtggcacttgcccttccacttgtcccaaaatcttcacagcaaatggattttcataattcccttctgtgatacgaagtttgaacttgctctgtccatccacgaccgcaaagagatccttggtaacagccaaaggcaagaccgagttacgtggaaccacgacactattatagtagtcacccacaaaactgtagttcttgtttggatttttcttgaagagcagaccaattccctgagaggtcacatccttgacaaccactctatctgtctcagttgtcttaccatcctggtgttcagagaagctaacctcattattgacgataaggtcagccaaaatagatgccccttgtgccacgatagtgtctggattaaggtcaaacttaggttccaaaccactcatcaaacgaatcatctgacgaatcattggcatacgtgttgacccacccacaaggagaatatggtcaatctcttcccatttcaagccagatgcttgaagggtagactgcaccttgatttcagtatctttgagaaggtccaaggtaatttcattgaaaatcgcttgagtaatcaagacaccgtaaccttgaccattgacatagtgctcatagagagcttggtcattcacagatagactagtcttaatctgctcagccttatattgaagttgaattttttccttctcggaaaggttagtcatattgaccccttgtttttccaactcctgcatgatgtagcccacaaggcgcttatcaaagtcaatcccaccaaggcgtgaattcccgtcagttgccaaaatatcataggcatggtcagccacgcgcatgatggtaacgtcaaaagttcctccaccaaggtcgaagaccaagacatttccttgagcatttttagtgtgggcataggcaatggccgcagctgtaggctcattaataatacgcaagacattaaatcctgcaatacgaccagcattcttagttgccgcacgttgatctgatgtaaagtaggcaggtactgtgataacagcatccttgataccatctgcttgacccatctcctgcccaacgacataggcacgcttacggaattcgttcaaaaccaaggccgaaagaataatagaattgacacgtgtgtggtctggtgtatcactagcaattggacgcccaatatcacgtttaaaatcaaatttaaagttttctgtacttccgatttctgtcccacgttcaatggcttccttaccaaaagacacatggttttggccactaatatttgagaaataaaccgctgaacgtaagacctgatcgtcattcgtccccatcggaataatctctggcacatcttcacgaacaacagccataacggaattcgttgttcctaaatcaataccaatcgctttttttctcataacaatttcccttctagcctcattttgagtttacttgactatcgctccaagcaagcatctgcttagatgtctccattcatcgctgtcacataaaactccaaaagagtaaagttattccagtctagtttttttcactatactatattatcacaaaaaaagagactataaaataggaaaaaagggagtaggaccgaacaactttttaaaaattgttccttgtcccactcccttgagtattagttgatttgaaagacttgatgaacttagaaatcccagagctattgccctcctaaattgtcatgtttatagcaacttctctcctaacttaatcaattgaactctcaccaacatagataatttctaaattacccaaggaaacatcgcctttgatgtagaaatccttgctggtcaaattgctaggattttcctcatgctgtacagctgagagagagttatccacattcacatgcactcgccaatcactgggcacatagaggctaagacttccaagagaaacgtccacatcaaactgggcagatggcccctcaatacggcaattatcaaaatagacggaagcctgtcctaaactaacatctgcactcccatgcgtaaattgcttgtcattgagatatttggtcactgctgaaaaagtgacatcaatatcatttcctccattattagcgtctgaaccagttacacccaatccaaaacgattctttgttttactagaagaattgaagagaatgttcaagccaataactgcaagaatggaagaaaggataacgaccgaattagatactggaagaaaatggaactgtccattgagtgagaaaagagccacaataccataggcgaaaccaagaccaaaatgtcgcttcaaaagactagaaagggataaagtagctaataagaccacccaggccaacatccaaatactaatttcccattttataaagtagtcctgtacaattactaaagctgccaaaaggatcaagaggatcccaattaatttctttctcattaacttacctcatttcgtttagtcgttcttttaaaacttgataatagcgtcttgatacatggacctgcttgtgggtctgatagaaattcaccgtactggtccctgaaaaagacttctccaaagaataaatctgtttagcattaacaatcgtcgatttggaaatccgacaaaaggcaatcggaagcaattcctccaattcgtaaagcttttgtttcacctcataggcctcatccttagtatgaccatatattttctccccgtctgtttcaaaaaagagaatatctgccaaatccagaaaatattcgcttcgttccttgtaaaaggctaaaggaactaacttttgctttagaatagactcttggagctgggctaattcctgtgttaaccgaggagctcgaatcaagatttcaggctcatccatggatgggtctaattcgattctaactttcataagactcctttcctgtccttttgatgcttccattataacaactgctttacacaaaacaaggccttttgggtaagtggcacggtttagcccctaagaggtaaaaacagacaaacaaaagaacctggctgttgccaagttctcatttttagtgtggaggactccctcccatttgtaatctgttcaatgctgactaactgggcaagcaactactacttcacagtatcttcacgactcactttttgtgattcaccagccttaccattgatacggtagtcgctgtagttaaaaccactactgctagagtcgctatcgtcaccaacatattccacattacatgaccaagagattttatctttgatatctcctgatgacttaaatttcgaatcataaccataatagaaatcataaactgctgtgaaggtcaccttgaaggtcttctcaccagtctgaacgacttctgtgacgtcaacgtctgagaaagaaatactatcagcagcacggtttttagcacccgtagtatttctatcaatatcagctgttacatccttgtacatggtatcatcagtaccattaaggaaaatgtcggatacaccatctggtgttgtgttgtgattagaagcgtagctaccaaatttaccgtaggcagcagtcaaaagacgatctgccgtatcacgatcaagaacaccatcagcatctagagtgaccgtttgaccttcggagattttcttaatagacaatgtctctgtcttgatagagctaccatcttcgaaattcttcttaacataaacggctgacgaaccagctactgctaccttgttaacatctagtttccctgagttaagggttccaatcttggtaccaccaacatagaggtctccatccttaagattagacttaacagtaaagctgagatactctacagagagattgacttctgttttagaggtcacattttcctcagatgagacagtgatatcttgatcatttaccttaccagaagccacaaaattgtaagttcctggatagagatgattcaatttagccgtgtagttattaccatctgtggtcgcgtaagaaaccccgttaatagtcacattcaaatcagctgtattaacggtcaaatcaaccgttccaggatctaccacgattcgccactttggaaaaataaggaactgacgtccaaccttttgcatacgttcgccagacatgagttggctcttgctataggcttgtgtacttttagtgtctgtgtacttaacttcagatgttttaatttcctttttagtatcagaccatacttggtattccaagctatctttaaagctcttcttggctgctgcttcataacgttctgctacttgaccacgtgagtagtaataagaaccaaagccgtaactagcaagtgctaagactgctgcaacaacaccagcaataatcaggattttcttccctttagccatagctggcttggctggtttcgcagccttaccatctgagataaactgatggatggttgatacatcataacctgaagacttaccaagtaggaattcctcaggaagaggctgacgtccaacataggttttaaaagccttcatccagatagcttgtgcttctttagaagcggcctctgaattttcttcagcttgaccttgatctgcttgagatactggtgcaagctccttttctaaaggagttgtttcctcttcatcaccaagcggtacatcttcaaacacttcctcggcaacgtcatactcatcaacttcttctgttggttcagaaggagtggcatcttggtccaagcccatcgccgcaatgcctttaatagcctttaagtcaaagtctgctttctggccttcttcaatctccaaagcatggggcggacgaccaactgccttttcaaataaatcaatccacttttcttttgttgccataaagactcctataaacttactttttcaaaaaatgctagaggtttacttagattagaatagaagccccaccataaatgatgacataatagtaaatacgattgcaaacaagattgacaaaattacaccattcaaaagtgctgccaagatcatttgatagaacttatcagccttccacgctgttgttacaggaacaattgtaaagaggtttgcaagtgcaaataagaagtaaacaacatagaacaagaaaagcgggaagccaacaagtccaatagctccgaacaagattgttacgagcaagattggcaaggccaatgatgtcaagcgaccaaaacggtcaaagctattcaagaaagtagtctcaggatcacggaagatagccttacgtgtcacaaaccctgccaagataaaggcaaagataaagaggaaggcagctaggatactagcaaagaaagctccaaaaccaatgctagatgtatggcttgaaattgaagatgagtaactatctgttccataagaaccaaaaatgctagccaatgcgtttgttgttgatacaactgggctaacaaatttacgtgccatagcgctcaagattgcaaagaaggcaagtccagtgaagagtgacaagaagatatagttaagccaaccattgtgtttaccataatctgtcatgtctgctggacgacgccatgcattaagcaaccatgtccagtagtttttgaaagttgtcgcaaatgctgatggttgggctggaacaactacagcttgaccgttgataaattgaacgttttgacctggttgaagaggttgaccgttagcaaaagctgcttgttgaccagcttgagcattggcaaaaccagcttgtggttgcgccgcttgatttggcactccttgtactggagcagcttgagcacctgcaaaggttggttgaggttgtgctgcctgagcatttgtaaaaggagcttgcgcttgtgcgtcttgtgcactcgcaaaagtcggctgtggttgcgcttcttgggcaccagcgaaagttggctgtggttgcgcctcttgggctggtgtttcttgaacattagcgaaagctggttgcgctggcgcttcttgtgttggggcagtttctactgctggtgcgtcatcttggaactcaccagctgcaagtgctgctgcaatttcttcttcagtcgctgaacgaccattgatggcttcaaaaaagtctaaccaatctgctttagtcataataatctccttaaaaatacatagaatgactttattttatcacaaataaagccattaataaatgtcatttttattagaaaaaggcttggagcaaactgtccaaacctttatatcttcttacttatttctttgtagagatttttgaatctgacgatccagctctcgtttaatgtgtggttctggtgcaaatcgctcttcccagtcacttggcttaagaattttatgggtcacaggatcaaaatgagccttgccatctgggaaaattttacccatattagcctcatgaaccgtatcaaagaaaggtttaggatcaacccccataaggacaaatgaaccataggtcaagtaaagcaagtcagtcaaagcatccacctgaccaaccatcgttgactctgagtgctctttagaactaactttgagggctgccttatcaagagcagcatgcaaatccagaacagcctgaccaaagacacgcttatccccacctgatgaagcatatagaaactcgacgatttcttccaacttgaagtccgcacggtgactagcttcctcaataccgtaaacacgaggcatgtcggtagttgagccatccatcaaatggtggaaatccttaaccttgttgaagttgtcatcatcactggtaaatgaattttctgtctcaaagtgaatcaaaccgtagtgagataaggctttggcaatcccattctggttattagtatcagtgacatgggtagcctggtctttcagctcgtcttcaccattccccatggcaacaccaatgccgacgccagacagcatttctaggtcattttccgaatccccaaaggccataacctcactgagttcgaaaccaaaaacctcacctagatgagcgataccttttaacttagattggtccgctgaaataatatcggctgaataagggcttgaacgggtaatcttcacatgaggaaacttttcttcaatatcttgtgtttcacccaccgtcgctaccataactacctgataaataggctcacgcatgatagtcttaagagtctcaatactttgtggcttgaaacgacgaatcaaagacttgaaactacgttccaccatcttagcccaggacttagggacaatacggctaacgatttgcccaaacttactcgttcccatactgataatattggaaccaacaagacctgtgctagtccctagagaaatctctctacggtgcttggtggcatagcgaatcaagttgtagactgttgatttagggagctgattttgatacaggaccttgtcatgagtcaaaatatattgaccattataagtgactgcaaaatccagacccagattgtccatgaaaggctgaacaaatcctggaccacgacctgttgccaaaccaaccaagataccatcttccttcatttgactgatagcttttttggttgaacttgacacacgttttcggtcatttagaaaagtcccatcaatatcaaaaaagactgctttaatggccacagagctcccctccttctaacatattatgctaaaataaattataacatataatataatggtgagtaatataaatgacaaaaaaaatcctagtccttcacactggaggaacaatttccatgtcagcggataatgatggcaaggtcagtcaaaacgctgataatcccatgaaccatgtggggcttgatttagacaatttagaactaaccgttctcgattttcttaatatcccaagcccacatatcacaccctaccacatgctggatatttacaaaaaaatcaaggaaacagctgggcaatatgatggtgtggtcatcacccacggaacagatactctggaagagacagcctacttcctagacaccatggccgtccctgagattccaatcgtcctaactggtgccatgcgttcgtcgaacgaactaggaagcgacggagtctataactatctctcagccctacgtgttgctagcgacgacaaggccgctgacaaaggaatcctggtcgttatgaatgatgaaatccatgcagccaagtatgtgactaagacccataccacaaacgtggcaaccttccacacaccaacccacggtccactaggaatcatcatgaagcatgatatcctctggttcaaaactgcagagcctcgggttcgttttgacttggaacaaatcacaggaacagtaccaatcatcaaggcctatgctgggatgggtatcggagatggaatcatcagtctcctagaccctgaaaagattgatggcgttgttatcgaggcactaggtgctggaaacctcccaccattggctgcaagagaaatcacaaatcttatggaaaaaggagtccctgttgtgctcgtttcccgctgcttcaacggtatcgccgaacctgtctacgcctatgaaggcgggggagtcaaactccaagaagctggcgttatgtttgttaaagaactcaacgcaccaaaggctcgcctcaaactcctcatcgcactcagtgcgggactcaaagaccaagaattgaaagactatatcgagggataagacatgaaacttagtattgaagcaaccgataaattggaaaataaagatttccactatgagctgacagtctcaaaaacacatatcgccatggtctgtggcaccgtgctagccagtctagccctggtcgcatggttgaagaaaaaataaaaagcttgaagcatgatcactagagaagtgactgaactgcttcaggcttttaattttattcatctggtctatattcaagaatatctcctggttggcaatctagctccttacaaatagcatccagtgttgtaaaacggattgccttggccttgcctgtcttaagaactgaaaggttggctggggtaataccaatacgttctgctagctcacccgagcgcatcttcttcttggcaagttcaacgtccaaattgacaataatcataagcccctcctaaatcgtgtactcattttcctcagcaatggcattagccttagtcaaaatcatagcaacagcatagagaacaaagctaactagcaaataactgatattaaagaaactataactctggttgcctgtcccaaatgtaaaaataccattattgataaaggccccaagaacgagcaaatgcgctgaccaacgaactaacttagcatttttagcgataaaaatatcagaacgataaagattaatcagaaaggcacgtagacacaacaagaagcctatgttgactaacatacgaaggaaatcaatggttgctgcaaaaagcgtcagactagtgctactacttttcacagtaacccccgaaccaagaagcatacgcaaaccttgttgtaagagtccttcatgaccagtcaggataaaggcatcattaagaatggtaataacaagacttaaaaagcccgcaaaaaggaggacattaacaaacaggagaatactacgtagacgtttctgttcttgcgtttcctgacgatttttagcacttttggctgatctccaaccataataactagagccagccaaggctaggatgattaaaaaataaaataagatagttgtcatgtgttacctcgattgtaaattcatttgatttctttgagcatagactagaaaaagccaaggtgcctctaggagcccttgacctcatacaaatcattagctaactattaacagtatcaattatatcgaatatcaatataaaatactagtttataggtaagattttactacttttcaaataagattctttcaattatttgacagctgtttgtcccttacgaagacggacagcatcacaagctagagagaccaagaggagccagactgatgtgctgaagtccactacaaggtgattagtcgttcccaactgcaggaagatattcaaggctgatggcacaaaggttagaagagcagcctttttcaagaagagagaaaaatcttctgtccaaaatgccttccaagtaaagtctttaagctctttacgaaggagccaaagcaaggcaagatagaaggcgaattgtaactctgagactagccagtaaccccatccagaaagataatgaacctcagcacctgggaaaagattagtcacatccacaaaaggaaggataagtaaagcaagcattgcaagaccgtagattgccataagaagaataagaactgcgttgatgattgatttaagtgttttcatgataagtatttcctttattaaatagtttttggtatataatttctctttttcgcgaataagattatctttatcgaaaacttattatcgtttatcgataattatatattacactctttatttctccttgtcaacacatttttatcgtttttcgatattttttatctaaaattcaaaaaataaaaaccagccaagaaaatctcaactggttagcttacttattttaatcgcctagactggtcatgcttccgtccagactttttatgagtttaagaagagggattctacgttatgaaaaaaaggaaaaagggattttggaaaatgagggatgaaagttgtagaatatgggtaaattgagcctcttcctagcatcaatactagttttgataaaccttaaagtcttgaggatgcttctggaaatttcggttgtaggttactttaatttttactgtcattgttttgtcctccttttttaggaatggtttggcttagccaaaacgttttattatcaaaacctatctcgttttgatggttttattataggtgtcctaacttaaagaaagcttgtaataagcttgaaggaaacttaaaactctcagtgagtttactgagagtttttctgtctaaatcatggataaaataattcccaagaccagagccacccaaacggcatagcgaattgtcgcatgatagcggtaactttcaataaccttgggtagctttgtaaagagataggcaatgtaggcaactatggaaagaaaataccctttaaaattccaggacgagcctaagatactaaaatcttcgaataggggcacaagcatcagtacagccgtaagcatacaccagaccggcaaaagcgtcctttccttttgatgctgtatatggataatcagttgagctataaaacccgcgacgtacataatcagtaataccgaacaaactaaagagataagaagtgaataaagatatagggtatgaaagtccgtctttccttctatcagctttgccaattcggtaataaaccagatcaagatgaaggcgaaaaaataaaatataagacctagtatcataagaaacaagggatgcaagatagcaaaaaaatcgatttttaaccgtttctttttcatgggtttcctcctcaatcaaactcgccttggcttctcaaatgagctcctagcacctgccaatcaggattctcgcgccagttagggtcagacacaatttggctggccacgcgccttgcttcttctaggatattatagtcttccacaatatcagccacttgaaattcaggaattcctgactgacgtgttccaaagatctctcctgaaccacgcattttaaggtcctcttctgctagaacaaaaccatccgtagtctcacacatggcctgcatgcgttttttcccggtatcatttttaggattagccaccaaaacacagtaggactgcttatggccacgacctacacgtccacgaagttggtgaagctggctaagtccaaagcggtcggcatccataatgaccataaccgtagcatttggcacgttaaccccaacttcgataactgtagttgatactaaaatctgagattttttatccttgaaatcttgcataatttggtctttttcatcatttttcatgcgaccgtgcatcagagccactgtagctgaatcccccaaaaaatctgtgagttcctgatgaagggccactgcatttttcaaatcaagagcctcagactcttcaatcaaaggtgaaataaaatagacctgagcatctttttccaactcgcccttaatccaagtcagtacggtatctagttgctcatgtttaacccaacgggtaataatgggcttacgcccagctggcatctggtcaatgattgacacatccatctccccaaaggcagtgattgccaaagtcctagggataggggttgctgtcatcatgaggacatcaggattgtcacctttctcacgaaaaatacgacgttgattaaccccaaaacggtgctgctcatcagtaattactagcccaagcctgtgataagttacagcatcctgaatcagtgagtgagtccccacgatcatctgagcctccccagattcgattttggaaagagctacttttttgtccgctgccttcatcccagaagttaggagcattacctctagctcaggaaaaagcccctgtaaactctgatagtgctgctctgctaagatttccgtcggtaccatgagggcagactgcaatcctgccgtataagccccatacatggccagactagcgataactgttttccctgaacccacatctccttgcaaaagacggttcatatgagccccagatttcatatcagctaggatttccgataaactacgctgttgggcttctgtcaaggggaatggtaattctgcaattttggctttgattttggcttcatcgtaagcaattgctagaccattggtttcggacttattctcagccttcagcacctgtaagttcatctggaaataaaagagctcttcaaacttggtcctacgcagagcctgcttatattcagccaaatctttcggaaaatgcatggcacgcacagcctcttggcgtcccatgagacgatacttgtccataagcacctgtgggagactctcctccaacaaattcaaggccccactatcaaaagctgcctttatagcctttatcagttgggcctgactaacgccctgggccacatgatagactggctgcatatcgtcctcaacttgagccaacactttcataccagtcactgcagacttcttctggtcccatttgccaaaaatagccacttctgcccccatctcaatcttgtccacaagataaggctggttgaagaaactaatggcaatcactgcctctccttgcttgattttaaaactcagacgattccgtttaaagccataatactgcacattggcaggtgtcaccaccgttcccgtaataacagccttttcgccatccatcagttcaaagatagacttactcttaaaatcttcatatcggaaaggaaaataaagcaagaggtccccaaccgtgtgcaaatctaatttggtaaatttttcagcggacttaggaccaaagcctttcaaatccgcaatcggtgaatctagttgaatcatatcctctatcatttctatcgtgttcttctcctcgtgaaagaggaagccttatcagctattataacacatgaaaatggtcttcactaaaatcaaaaaatccagtatcaaactggatttctctttttatttatattaatcatagctacgaggtacacgatcactaagcaaacaaagaacttcgtagttgatagtaccacgtttttcagccacctctgtcgcagtgatgcttgctcctccatttccacccataagagtgacaggagttcctaggggataaaccttaggaaggcgaacagtgatttggtccatagacacacgcccaacaataggacaaagctgtccatccacaataacgtggaaaccttgtaaatctctggtccaaccatccgcatagccaatcggaatggttccaataacctcatcagctgtcgtcgtatacgttgcaccataacccacatcttgacctgctggcagggtcttaacatgaacaagtgctgtctccaaacttaaggcaggacgaatgttatatggaaggtctaaaacactgccactaggattgagaccatagatgacgacacctagacgtaccgcattaaagactgtttctgcatgccagatactcgtcgcagagttgctagcatgtaccaagcgagggcggtccaccaagttattaaccaaatccgtgaagaaggccaattgacgcttgaatttactatcatctgcctcatcagccgttgcaaaatgagtaaaaataccttcgacattcgcaccaagtgatttcagaccagcaatcaagctatccgcatccccttggctacgcaccccaatacgacccatacctgaatcaaccttaatatgacaggttaaaccagtcaaatcaagcccttgattcttagtcatttccaaccactctagcgaagctaccgtcagcgtgatgttttcttgaatagccaaaggaacctcgtctggcaagactactcctaaaataagtatcggttgttctaagccagcttgacgaagttcaagcgcctcgtctaggttggaaacacaaaaaccatccacctgcttagatacatgcttggccacttcgacagcgccatgaccataagcattggccttaacaactgcaaaagtctgcacctgtttagggatgtgactaagcacttgttcaatattttctgaaattgctgatagatcaacctttgccaaggttggtcgatgtaaacttgaaatcataagctatcctcttccaacatctatctcttagtttttttctaaaatgacacttgcctgaacaaaatcaccgctatgggaaatcgagataaaaaccttgccttcaaaaggtgattgggtcaccactggagctcccttgtcattggtcaatatttcaatatccttaaagccgactgctccaataccagtaccccaggcctttgaaaatgcttccttaccggcccaacgccctgctaaataggacatctgacgattaccagaaagggattcaaaacgctcccactcttttggtgtcaataccttttttgcaaagcgtggattacggtcataagccttttttacagctgaaatttcctgcaagtctataccatatccaaaaatcataattataacgaaagtcgattgtggatttcacgaataaggctatctgtcttatcccaaccaagacatggatctgtaattgatttaccataaacttcaggtgtgtcttgacgaccatcctcaaggtaagactcaatcataaagccacgcacggtatccgcgatacgctcatcccactcacggttaagaaggacttcacgcacaatacgaacttgctccatgaagtttttacctgagttgtcatggttagtatcaacaaggataaatggattttccagattaagtgcactatacttgtccaaagccttaaccaagtcctcgtaatggtagttgacaatgttctgaccattttcattgttggcaccacgcaggatagcgtgagcgagtgggttaccatctgttttaacttcagcaccattgtaaaggaaatgctgttgattctgcgcagcatagataccattaaacatgacattcaaattccctgacgttgggttcttcaagccaattggcacatcaatacctgaagctacaaagcggtgctcttggtcctcaacagaacgtgctccaacagcatgatagctaagcaaatcatcaaagaaggaaagatttgacggataaagcatctcgtcagcgatgggaagacctgtctcagtaataatacgtgactgaaggtggcgaactgccttaaccccagcaagaaggtctacatcaccctctgcatctggctggtggataagccccttataaccgtccccattagtacgtggtttagctgtataaacacgcataacaataaagattttatctttcacttcttcctgaagtttggccaaacggtgagcatagtcaagaacagcttcttcattatcagacgaacatggaccaataaccaagagaatacgtttgtcctcacccttgataatttttgccaaagcctcatcattagcctgtttagttactagtgcatctcccgtaagagcatgcaatttccttacttccgctacatcaataagcggactattttgatgaattcccatctatttccctctctttgtgaaaagagagcgaaccgcttggtcatccaaacggttcactccccatatatggtttctgttaccttattattttgacaaagtatcgtggatttcacgaatcaattcttctgtcttatcccaaccaagacatgggtcagtgattgatttaccatagacatctggcgcatcttgacggccatcttcaaggtaagattcgatcatgaaaccacgtgcaactttgttgattttttcattccagtcacggttaatcaaggtttgacgaacaatacggatttgttccaagtaacgtttacctgagttatcatggtttgtatcaataacgatgaacggattttcaaggcccatttgttcataatgttcgattgtttcaagaacatcatcatagtagaagttaggcacgtttttaccatattcattcgttgagccacgaagaataacgtgtgccaatgggttacctgaagtttcaacttcttcaccgttaaagaggaagttttgtttgttttgtgcagcgtagataccattaaacataacgttaaggttccctgatgttgggttcttcataccagttggaacatcaatacctgatgcaacaaaacggtgttgttggtcttctacagaacgtgcaccgatggcaatatatgacacaaggtcatctaccaaaggaaggttttctgggtaaagcatttcatcagcagttgtgataccagtttcagtgataacacggtagtgaagattacgcacagccttgataccattgattaggtttggtttaccttcagcatcaggttggtggacaagtcctttataaccatcaccatttgtacgaggtttagctgtataaacacgcataaccataaagactttatctttcacttcttcttgaagtttagccaaacggcgagcataatcaagaactgcatcctcattatcagatgaacatggaccaataaccaaaagcgtacggtcatcttcacccttgatgattgcttcaagctctttatcacgagcttgtttcttggcaagggcttcacctgtcaatgtagttgattctttgactgcatcaaaatcaattttttcacttactgctttaaaaaccataataattacctatttcttttttcctaaaattgtttacgaccgtgacaatttttaaatttcttaccagagccacatggacagaagtcattacgaccaaccttactaaagtcaatttcttgaccattagcatctgcttggtgagcctggatattgcctgttgctgttgttgaaacacgttcattcacattttcacgagattgttcatgaatttgtgctttcatcattgtacgtgtcacatcatattcaattgccccaatcatatcttggaacatcttgaacccttcagattgatactcaacgattgggttgttttgggcataaccacgcaaaccaacggcattacgtaattgatcaagggcatcgatatggtccgtccacttgttatcaacaaccatcaaaatcaagactttttggaattcacggatagcttcctctgaacgcaatttcttgatttgacgatcataaacatcatctgctaactcattcaagtaaactttaatagcgtcataattaacactacgtttcgttacctctcccacttctcgtaaatcttcaagtgagatggcattctcaggaaccaaggcctgacgagcaaagttcaagatacctttaagagcttcctcttgatcattgcggctgtgaccatctaccgtacggttaatcgtacgcttaatcatagccttaatctcaggttcaaggtcacgttccgctgtgataacatcataacgctcagcgtagatgatttcacgttgttcacgcataacgtcatcgtactgaaggacttgtttacgagtatcgtagttatttccttcgacacgtttttgagccgcttccacttggcgtgtcaacatacgtgatttgataacgatatcttcatcatcagcattcaaacgttccaagacttgcttgatacgatcagaaccgaaacgacgcatcaattcgtcttcaagtgaaaggtagaattgagattcccctgggtccccttgacgtcccgcacgaccacgcaactggttatcaatacgacggctttcgtgacgttcggtaccaataacacaaagtccaccaagttcaagaacaccttcaccaagtttgatatcggtaccacgaccggccatgttggtcgcaatcgtaacggcaccacgttgacccgcattcatgataatatgcgcttctttttcgtggtttttagcattaagcacttcatgaggaatgcctgcttcaaccaacatcttagaaatcaagtcagatgtttcaacggcaaccgtaccaacaaggactggctgtcccttttcataacgacgtttaacatcttgtaccacagcacggaatttagcatccaaggttgggtaaagaaggtcgtcgtggtcaatacgttgaattggacggttagttggaatcggaatgattcgcatgttatagatttcacggaattcatcttcctcagtcttaccagtaccagtcatccctgacaatttcttgtacatacggaacatattttggtaagtgattgaggcagatgtcttcgtttcttcttgaaccggtacaccttcttttgcttcaatggcttggtggagtccatctgagaaacgacgaccttccatggtacgacctgtaaattggtcgacgataagaatttcttgctcaggacttaccacatagtcaatatcatgcaacatgatgtagttggcacgaagggcattgtcaatatagtgagtcaaggcaacattgtcaatatcgtacaagttgtccaagttgaagaattcttcagccttgtcaatacctgagtcattcaaaccaattgtttttgttggaatatcaatggcataatcgtcctctgtcaaggtcttaacaaaggcatctgcacgatgatacaattggttagtttctgaacttacaggacctgatacaatcaatggtgtacgagcttcatcgataagaaccgagtcaacctcatcgaccaaggcatagttcaatggacgttgtaccatgttttccttacgaacaaccatgttatcacgaagatagtcgaaacctacctctgagttggttgagtaagtgatgtcacagttataagcttcacgtttttcagctggtgatttggcagaaaggttaatccctactgacaaaccaagccaactataaagctcacccatttcagtcgcatcacgctctgaaaggtattcgttaacggtgataacgtgtacaccttcacctgaaatagcatttaggtaaacaggcattgtcgcagtcagggttttcccttcccctgtacgcatctctgggacgtcaccatggtgaagaacgataccacccatgatttgcacacgatatgggaaaagtccaaggacacgttttgccccttcacgaacaactgcaaatgcctctggcaagagttggtctaggctttctccgttttgatatcgttttttaaattcttctgtttttgcctgaagttcttcatctgaaagagccgccattgcatcagcatagctctcgactttcttggcagttttttctagtttcttaatttcgcctttatcattttcaatgattttgcgtaatatatttgccatcttttttcctttcgacagtctttatctccatattttaccacaaaagccccctttaaacaagaaatcactcaaggattgacaaagaaaaaagccctagtttaagggctttcacaatggattcgcaaataaagtaaaacttttttattagattcactgaaaatatcgacaataatactttatgtctacttctcagagttttcttggctctctagaatatcctcaaaatcatgcaaaagattttcaaaagcctgctcaaagaaagcatggtcggtgctactacaggccttcattatcataggactagcttcaaaatcaacgtaaaattgatagtccaagacaccatttttccagtaaaatttgatgctaggggaagctgttttttcaccacacataccaggaattgcccgttgtaagccataaatatggtcgccatagtctttcagacgataataagctccctcaaaataataggatttgttgatttcaatacgctcaaatagggccgctaaaactttttcattactcatacttaagcctcgttagggtgactgacaatcatctccaattgtccatcaatttcccaatctgtcacatcatttggaagaataaagtgatcgcctttttttagacaataaatgcgtgaatcgatagtcatggtcccattgccagaaagtacggaacaaagcaaatagggagctgattgcttgaagtcaaccaagccactgagtttccatttatacacagtgaaaaaggagtttgatgttaaacaagtcgactctaattgcaaggtcttaacagttgctgggatgctattttctggagcccctagattcaagacatcaagagactgttgaatatgaagttcacgtttattgccctgatcatccctacgatcaaaatcatatacacggtaagtagtatcactagattgttgagtctctaagataaggatacctggaccaatagcatgcatggtgccacttggtacaaagaaaaagtcacctttcttaacaggagttttcgacaaaagtccatcccaatcacctgcttcaatcaaggatgccagctcttccttggtcttagccttgtgaccataaataatttctgcaccctcttcagcatcaataatataccaacattctgtctttcctagctcaccttcgtgctctatcccataagcatcatcagggtgtacctgcactgagagccagtcattagcgtccaaaatcttagtcaataaaggaaaaacactagtcttggggttcccaaaaagttctggtttatccttgtaaagctctgccaggtggaaaccagcatattttccatttttgacataggatacaccattaggatgggcagaaattgcccagtattcaccagtctgttcactgggaatatcgtaaccaaactctgtcttgaggcggttccctccccagattttctcatgcattggtgaatctaaaaataaaggttccattacttcctcctgtatagagcaaaacgccttaagattatctcttaaagcgattttacatattttgtttatttgtttgcatgcttgtcagctacgtctttagcaagtgcgaagttaccaagcgtcgcagaaccattacctgaaacagcaggtgtcacaatatactcatttacatctggtactggaaggtaaccattcaaaagagctgtgaatttttcacgaacacgacgaagcatgtgttcttgccccataacaccaccgccaaagacgataacttcaggacggtaaaggactgttgcttggacagccgcttgagcaatgtagtaagcttggacatcccaaacttcagaatgctgatcaatcaattcaccacgaatacctgtacgagcttcgagcgatggtccagcagctaaaccttccaaacatccacggtggaatggacaagtaccgttaaattcattggaaacatcatttgggtgaagaggtacatatacgtgaccagcttcagtatgacccataccaccaatgaattcaccattttgaatagctccagctccgatacctgttccgatagtgtagtaaacaagactcttaacacctttacgaacaagtgtctcaccataagcagatgagttaacatcagtcgtaaagtagaaaggaatattaaactccttagcaatcaaaccaagaaggtcgacatttgaccaatgtggttttggtgttgaagtcacaaaaccatatgtttcagagtttggatcaacatcaattggtccaaatgaaccaattgcaattccagccaattgatcttcataacgtttgaaaaattcaatagtacggtcaattgtttcgtaaggtgtagttgttgggaattgagttttttcaacgacttggaatttctcatcgccaacagcacaaacaaattttgtaccaccagcttccaagcttccgtaaagtttagccataggtaaagctatctccttttatgatcaataataactatttatactattataaataaaagctaggcaaaagacaatctaaatgagaccttgtttaaggaggtacagactactctgcttcatacttttctttatgagccatttaactaaaaaagccgaattggcttcgacttttctagcttattatttaactgcgatgaagtctgcaccttcagcaactgaaccagtcgctactgatgaaacatcttcgaagtctgcagtgtttgtaacgataaccatagttgtatcgtcaagacctgcttcagtgattactgagctatcgaaggtagccaagacatcaccttttttaatacgttgatttgcttgaactttagcatcaaatcctttaccgtcaagtgagacagtgtcgataccgatgtggataagcacttcagcacctttatcagatttaagaccgtaagcgtgacctgttgggaaggcgatttgcacttcaccatcaaatggtgcgactacttggtttcctgaaggtttaatagcggcacctttacccatagctcctgatgagaagactgggtcattaacattttccaaagctacaacttcacctttaagtggtgcagcgattgtttcggcttgcaatgcaactggagctgattctgcagatgcaatatcttcagcaacaacttctttttgagcttcaacttcttcctctttgtaaccgaagatccaagtaagagcaaaaccaagagcaagtgttacaagtaccataagaacatatttaagtacttgaccgttaaggtaaagaagagtaccaggaacgattgttacaccaaatcctgtaccagcgaggttaaggattgaggccaaccaaccaccagcagcaccagcgataagacccatgataaatggtttaccgaaacgaaggttaaccccaaagatagctggttcagtgataccaagtaccgctgaaagagttgcagggaaagcaagtgctttcaatttagcatctttagttttaacacccactgcaagtgtcgcaccagcttgggcagtcatagcagctgtgatgatagcgttaagtgggtctttaccagtattagcaatgaggttagcttcaagcaagttaaagacgtggtgaacccctgtaacgacgataacttggtgaactccaccaagaacaagaccagcaagaccaaatggcaagttaagaatccattctgtagcagcaagaacatagctttcaacagtatggaagacaggaccaatgataaagagggccaaagctgacattactgcgaagacgataagtggacgcaagagaaggtcaagaacgtctggaacccatttacgaacccattgctcgaacttagcaccaagcaaacctacgaagaaggctggaagcactgagttttggtaacctactactggaataaaatcaaagaagtaaattggtttagcagcacctgatgcaacatcccaagcgttaggaagggcgttgttaaccatcatcaaaccaagaaccaaaccaagaagtggtgaaccaccaaatacgttaaaggctgaccaacaaatcaaggctgggaagaaggcgaaggctgtatctgtcaatacaactgtgtaagtgtagaaatctgtagcagcaaaagcttttgatgttgtaccgaacaaaccaagaactgtatcgttattgattgctccacggatacccatgaaaagaccagtcgctacgattgctggaagcaatggaacgaaaacgtcaccgaatgaacggatagcacgttggaaccagttaccttgtttagcagcttctgctttttgttcgtctttagatgctgttggaagaccttgagcaacgacttcgtcgtaaatcttgttaacagtacctgtaccaaaaatcatttggtattgacctgagttgaagaaagcaccttgaactttttcaatgttctcagccttttctttattgattttgttttcatctttgaccatcacacgtagacgagtcgcacagtgagcaacactgttgacgttttcacgtccaccaagggcatcgatgacttcttttgcaatttgtttgttatccatttgcaaaattctccttaataaaatttggtatgaaagcgtttagcttttctttacgataactattttagcatctttctatcatatgtcaaccgtttagcataattttttattttttttatgataaatcgttgatttttctaggtaaaacgtttactatattactaacaaatagattaggagatccctttatatgaatctaccaacagaagttcgttaccgtccatacgcagattggacaaacgaagaaaaaacaaaaattaaagaaaatgtcgctaaatcaccttggcgtgcaagttaccatatcgaaccagaaacaggtctacttaatgatccaaacggtttttcttactttaatggtaagttccaactcttctaccaaagttggccatttggagctgctcatggtttgaaacaatgggtgcatactgaatctgaagatttggttcactttacagaaactggtgtcaaactcttgccagaccatgaaaatgatagccacggtgcctactcaggttctgcttatcaaatcggtgataaactctttatcttctacacaggtaacgttcgtgatgaaaactggattcgtgacccacgtcaaatcggcgcttggatggataaagacggcaaaatcgaaaaattcgacaaggttcttatcaaacaacctgctgacgctactgggcacttccgtgaccctcaaatcttcgattacaagggacaattctacgctatcgtaggtgctcaaaaccacgataaacaaggttatatcaaactttacaaagctgttgataatgatgtagaaaactgggttgaagttggagacctagactttggtggtactggctcagaatacatgattgagtgtcctaaccttgtctttgtagataccaaacctgttcttctttatagcccacaaggtcttgataaagctgaacttgactatggcaatatttatcctaatacttataagattttccaagatttcgaccctgagaaatctgcccttgttgatggcacaccaattattaacttggactacgggttcgaagcttatgctactcaaggatttaacactcctgatggtcgtgcccttattgttagctggattggtctcccagacgtggactatccaactgacaaatacgactaccaaggtgctatgagcttggttaaagaattatctatcaaagatggtaaactttaccaatacccggtagaagctattacaagcttacgtgctagtcaagaagatttctctgaaaaaacggcaacaactaacacttacgagcttgaacttaactttgaagctaacactcaaacagaacttgtcctcttcgcagaccaagaaggaaatggcttgtcacttactgttgatactgagaacggaaaagttatccttgaccgttctaaagctggtgaacaatatgctactgactttggaacaagtcgtgaatgtacacttgatgccggtcaagctgcaacagcaaacatctttgtagataactcaatcgttgaaatttacttcaacaaaggtgagaaagtcttcactagtcgtgttttcccaagtgcagaacaaactggtatcaaagtaacatcaggaaacgtttctgggcactacttcgacttgaaatactaaggtgatttatggtcgcaaagcttactgacgttgccgaactggctggtgtgagcccaaccacagtttctcgcgtcataaacaaaaagggctacctctcacagaagaccattgacaaagttcacgctgctatgcaagaactcaactataaacctaataatttagctcgaggtcttcaaggaaagtcggccaaactcgttggcttgattttcccaaatatttccaatatattttatgccgaacttattgaacgtcttgaggatgaactctttaagcaaggctataaaaccattatttgtaatagtgaacatgatcctaacaaggagagggactatttggagatgcttgccgccaaccaatgtgacggcatcatctcgtctagtcacaatcttggtattgaggattatgagaaggttgaagctcccatcgttgccttcgaccgtaatctcgccccaaagattcctattgtttcgtctgacaactttgaaggtggcaagttagccgcaagagctatggtcaaggctggctgtcaacgcattgtcatgattacaggctatgataattcggattctccaacaggacttcgtcaactaggttttaattatgaattggacaaagaaggcattatttgtcctgttccaaacgatttgtctctcatgcgacgagaattagacatcaaatctattatctctcgtgaaaaaccagatggcatctttgtttcggacgatttaacagctatcttggttatgaagatagctagacaattgggactttctatcccagatgacctaaaaatcatcggttatgacggtaccgcctttatccgtcacttctacccagagttagcaactatccaacaacctttggatgaaattgctaagctttgtgtcgaaattcttctcaagaaaattaaaggcaaaacagttaatcgtgattatgtacttccagtgagtctgattgctggtggcagtatataaatgaaagtcgcaagaaatctccgcttgcgacttttttcttgttacatttgtagaaaaaaagaagttgaaacaacgctcaacttcttttacttatgcttcatctgtcacaaactgactaagtacaccattaatgaacttagcagatgtttcatcagaatattttttagcgatttcaatgatttcgttaatagctacacgtcctggtgtttcttcaaatgacgtgatttcataaagtcccaaacgaaggagagcacgatctgtcacaatcaaacgtgagaggctccaaccctctttcaacttttcttcaatttgactatcaagttgggccaactcttcacggacacctgttactaggctaaggagaaaggctggtacatcaacttcagtttcttcgtcaattggcttgtcataagtgtaagcgaaatgtgcttgttccagagcttctccaccaaattcaagggcaaaaagcgtttgaaaagcacgctcacgaaggtcacgacgtgaatctttaaagatattagtcattcaaaaaatcctcgttaaacaattcagccaagtctggtttttgtgacttttcagtaacaatagattcaacgtgaacattgacttctgaaattgccacttctgccatatcatagacagctgctttaacagccttttgaatttcaattgaaaccgctggtaccttaaccccatactgaagtgagacgtagatatcagcatttacagtaccatcttcttctgttcggaggtaaacaccacgtcccaagcttgttttgctgagactatccgtaacatttttattttgaagggcgtaaacaccttccactttagttgcagcgatacctgtaatcacttcgagcacgcgaggggcaattacaatttcaccgatattttctgtagtcatcgcatgtttcctttccgttagtttggaaaataaagccttcaaaccagtggcttgaaagacttagttgggcttaggcacgtgatacgtaagtaccttcagctgtgttgataaccaatttttgaccagcttcgataaagtctggaacgttaaccacaagaccagtttcaagtgttgcaggtttacctgaacctgtaactgttgcacctttgattgatggttgtgtttcagtaacagtcaattcaacagttgttggaacttgaacaccaataacttctgttccgtagaattggatttttacgtctgagttttcaaggataaatttcaattcttcttgaacgttggctactgggatttcatattggtcatatgtttcagtgttcatgaagtatgcagtatcatccatttggtacaagtattgtgctggtactgtttcgatgattgcttgttcaaatttttcttctggacgatagctagtatcaaaagttgaacctgagcgaacatcacgcaatttcatacgcatgattgtgttacctttaccaggtttgtggtggctagcttcaagaactttgatcaatttgccatcgttagttacgaaagtcatacccgcacggagtttacttgcttcaatcattattaaatacctctttgtaaaaaattattatcagtttattctaccataaatgacagcatggctcaaatgttttatagattcaagcccaatcctcaggcttttttcaaagaacaaactagtcatccattcctaagtgaacctctggaacatcatgttgcaaataagaaacacccttttgttccatcaactcaatcgcaaatgggtgcggtctataattggccttgtaagtaatctttacgataccagcttgcaagagggctttggtacagttgatacaaggaaaatgagtcacataaatctctgtatttttggtagaaatcccctctttggcacattggataagggcattcatctctgcgtgtaccgtacgaatacaatgaccatcttccatgtagtgacctacttcgttacagttatcagtctcagaaaccccgccattataacctgtagcgataatacgcttgtccttgactaaaacagccccaacaaaggcacgatcacacgtagaacgcttagaaatcagctctgcattagccataaaataatcttgccaagataaacggtttggcataaagtattcctccaaatcttagagaacaatcaattccttaggcgcaagggtaatcaattcacaaccattttctgtgataatgatgtcgtcttcgatacgaacaccatatttatcagccaaataaacacctggctcgtccgtcaagaccataccagcttcgatggtttcatcagaattaccaaagtaaggaatctcgtgaatatcaagaccgataccgtgtccgataccatgtgtaaagtaatcaccgtaccccgcttcgacaataacatcacgcgcaaccttatcatagtcacgacgtgtcatgccggccttagccgcgtcaatcaaggcctggttagaacgtagaacgatatcataaatttcacgctcctcatcagtagtgtcaccaatatggatagtacgagtcatatcgctaacgtagtggttgtagtaacaaccaaagtccatagtcaaggtttcaccagattggataaccttttctgaagcaaccccgtgaggcatagctgaacggtaacctgaagcaatgatagactcaaaggaaattcctgaagctccgtactcacgcatacggaaatctaggaagtttgccacttgtagctctgttgtttgacctggtttaatgaaatcaagcacatctgtaaaggcacggtctgagatagaacaagccttacggatagttgccaattctttttcgtccttgatcatacgcaactcttccatgaaattgctttgtggtgacaaagtgtagccttcaaaaatcgcttgaagaccttggtagtaagcaaatgacacctgattatcgaaaccgatagtttcaagtttatcagcctcgataattttaacaatatccttaagtggatccttagtttcgataatatcaaagccatgcacagattgtttggcaatgagggtataacgtgaatccgttaagaagaggcgacgattcttagtaatgaagacagtcgcatttgtcccccaaaaatctgttaaataatagatatttttttgtcctgtcaccaacaaggcatcaaggcctgattgggcaagtttggcatcaaatcgttcaagtctacgttgcattatgaattactcctttggtattttaggttaattataccaaattttcagactttaaaggattaaattgacattttagagtgtttttttgatgccataaagaaaaagccagatgaaactctagtcgattagttctttaatttctcgacatcaaaaacagtcaattagatgaatttggctataagatttgtaagaaaatctgccaggttccaaaacacttgcttaagttgagccatcactctaataactgatggctcagaagtactgtttaaagactgatcatcttcttcaatcagactctccggtgatggttcaggcaacggattttcagattttgccgctacttcagttgcctctgacaactcagttttatcattttcgctagcaaagacggcctgataaatagcttgagcatctggtgcactacctaggtaaccagaaaccaattgaccatttttaagacgaatcacacttggagtctccggaattcctaacttatcaaataaaaccttacgagattcacgatccaaatggtccgaatccgtattgtaataaagaagttggccatcgattaaagtattgaaatccttcaaaacgggagaattttgacggcaatagtaacagcttggccgacctatatacagaatatgatcgccaccatcttcagtcaacatattggtgacgtcactgtaagagatttgtgtcacattttcaagattcttttcataagcttcaactgagatctcttcagagctaacaccctcctcaatcacttttgtctgttctgagtaagatagtgaattttccttgatttcactactagaatcaacctgattagacacttgctcgggcgccttctcagaagaaacctgtacattacctgcttcaccatcctcaacagaaccactggctagttcggtagtcgtctccttagcatttagctcatctgccgacccactaattaccgctaattgacaagctcccaaaacgaagcttgacatcaaaacaaattgtatttttttcatctattctcctttttaatactgtattacaccttactacctacccaaaaacaataacaagggaaccattacactgataaccatatccgtctcctttcgttattaaaaaacaagacttttacaccctgttcaagctatgaatccattataaaagttgaataaaataaaaaatagtgacataaatgtcaccctgcacaagaaaaaatgaaaacaaaaaagactgagccaattagcggctctataatttctgtagtgggtaaaaccactgtagagattatagagctttttgaatgcacacaaaaagtctcataagaactataatggaaagcaaccaaaccatcattaggaagaacttatgagacttattaagaataccacagaattaatcggaattaaaaaacctaacatcattatttctcttgtttttgaaactgatactcatatcgagattcatgcaaaactggattaccctgaaccaacatgccctcattgccaaggaaagatgatcaaatatgactttcaaaaatcttctaaaatccctcttctcgaacaagctggaactccaacactactacgtctgaagaaacgtcgcttccagtataaaaattgtaggaaagtcatggtagctgagacatcaatcgttgagaaaaaccaccaaatctccaaccttgtccgacaaaaggttgctcaacttctaactgagaaggcatcactaacggatattgccagaagacttcgtatagcgacgtccactgtttatcgtaaacttgaccagtttactttcaaggaacattatgacaaactcccagctgttatgtcctgggatgcgtttgctttcaagaaaggtgaactcgctttcgtagctcaaaactatgagaccaacaaactcataaccatccttgataatcgccgtcaaaccattatccgaaaccactttttgaagtatccattgaaggttcgccaaaaagtacagtttattacaatggatatgtcaggagcctatatcccactagttcgtagacttttcccaaacgccgaaatcattattgatcgtttccacatcatccaacaccttggtcgagcctttttgaagacaagaattgccattatgaaccagtttaataacaagtcgctaccttatcgagctttaaaaaatcattggagactcttccaaaagaaccgccgtaagttatcttgtaaatcatttcactcgaagacctttgctcaaaccttaagtccacatgaagtcgttaggaagacactagacttttcagaagaactcgctaattattataacctctatcagctgttgctgtttcactttcaagagaagagggtagatgagttttttgagctcatagaggagaatgtaagcaaggtcaatcattacttcaaaactgtctttaggaccttccttaaacacaaaccatacatcaaaaatgcgctagaaacacattactcaaatgcaaaattggaggggaccaataagcttatcaaagacatcaaacgtctgggtttcggttttagaaactttattaactttaggaagcgtgttttcatcactctgaacataagacctatcaggtcctctctagatgttagcttttcgtcacccactacagttgacaaagagccgaaaatcatcgttcaatagacacaaaagagacccaccccttatgggatgagtctctttttcgaaaactgaaatagtctaactaactttattgagggatttaacctattaactattttagtctttttttttgcgttttcctgctaaaccaagtccagcaattgtcatcaaaccaccaaagagggtagccactaatgaagtgttttcacctgtttcaggaagcgctggagcttgtggagtcacaggagctcctggcttagctggttcttgtttaactggttgtgatttttccggttccggttgtggttgtggttgaggttctggttttggctcaggagttgctggtacgattggaacgtagatgattggtgtatcgtcacctgggtttgttggaaggtttggaagctccttacctggttctactggttgacctggtttgcttggatctgttggatctggcaagtatggtttgtaacctggtacgtctggtacaactggtttacctggtttcgttggatctgctggatcatttggatatttcacatctggtgttgatgggaatttcggattatcagatttcggaaccaagctaccaagcggtttgtaagtaactgtatctgttgcttcaggattttctggagtaactgtcttaccaccggcttctgtcttatcagcgtagtaacctggaattactggtacagataccttaccgtaagtatggctcttctcattccatgttgtagttccagaagctttgttttctttaccagtaaacgtaaagtcatcttggacattatctcctggagtcttatcgcctgctccttcaaacttaactgtttgtttagttggtttagtcacatcatttacgattggtacgtagatgattggtgtgtcgtcacctgggtttgttggaaggtttggaagctccttacctggttctactggttgacctggtttgcttggatcttttggatctggcaagtatggtttgtaacctggtacgtctggtacaactggtttacctggtttcgttggatctgctggatcatttggatatttcacatctggtgttgatgggaatttcggatcatcagatttcggaaccaagctaccaagcggtttgtaagtaactgtatctgttgcttcaggattttctggagtaactgtcttaccaccggcttctgtcttatcagcgtagtaacctggaattactggtacagataccttaccgtaagtatggctcttctcattccatgttgtagttccagaagctttgttttctttaccagtaaacgtaaagtcatcttggacattatctcctggagtcttatcgcctgctccttcaaacttaactgtttgtttagttggtttagtcacatcatttacgattggtacgtagatgattggtgtgtcgtcacctgggtttgttggaaggtttggaagctccttacctggttctactggttgacctggtttgcttggatctgttggatctggcaagtatggtttgtaacctggtacgtctggtacaactggtttacctggtttgcttggatctgttggatcatttggatatttcacatctggtgttgatgggaatttcggatcatcagatttcggaaccaagctaccaagcggtttgtaagtaactgtatctgttgcttcaggattttctggagtaactgtcttaccaccggcttctgtcttatcagcgtagtaacctggaattactggtacagataccttaccgtaagtatggctcttctcattccatgttgtagttccagaagctttgttttctttaccagtaaacgtaaagtcatcttggacattatctcctggagtcttatcgcctgctccttcaaacttaactgtttgtttagttggtttagtcacatcatttacgattggtacgtagatgattggtgtatcgtcacctgggtttgttggaaggtttggaagctccttacctggttctactggttgaccaggtttgcttggatcttttggatctggcaagtatggtttgtagcctggtacgtctggtacaactggtttacctggtttcgttggatctgctggatcatttggatatttcacatctggtgttgatgggaattttggatcatcagatttcggaaccaagctaccaagcggtttgtaagtgacagtttcttcaagattttcttgagtgactgtcttagaagcaacacttgctttatcagcgtagtaacctgtcaaacctggtgttggaactgcatcatagttagccttattagctgcccatggttcatcagggttaagaactttacctgtcaccttatcaagttttaaggtacgtgtccattgtgcattttgaacattgtcagctggggcagttgccttaccatctgataccacatacttaacagttgacattacgtctttcttccattgatcttccgcagtgtatttaggactgtttggatcatttggattgattggatctgttggattatgtggatcatttggcccaactggagtttcaccgtgtttcaaggttactgtccaagtttgatcaacagatggatctgtatcataagttgctcctgctgggaactcatcgcttacaagaacataaccacgatcttcatagtacttaatcttagctgcagttgagtagtcaatagcttcaccagatttaccagaaacttgatcattttcaagtgttgtaccagtattttggtctacgtacttgataatagctttttgttctgccttacggtagacaacaggtgtatcttctcctggtttgttaggagttacacttggtgtatccgtcacataacctgggatgactggagttggagtcttgccacccttagttggatcttctggatcattgttgtactgtggagttggtgctttaggaattggatttccttctggatcaactggaatgatcttaccaagcggtttgtaagtaaccttatccgtaacttctggttgatctggagtaactgtcttagatccagcttccttcttatcagcgtagtaacctgtaactactggaactgtttctttaccataagtgtgattaggttgatcccatgttgtcgtaccatttttttctttaccagtaaaggtgaagtcattttgaactttagcagccggagtattatctcccgctccttcaaacgttaccgtttgtttagttggtttagtcacatcatttacgattggaacatagacgattggcgtgttgcgtgaaatacgatctgggtcactctcgtcatttggctcaatcgttttatcaacaatattataaccccaagcttgtggttgttcttccttaatcttgtatccagtaggagcatctggaatttttgtttccgctgcttctgtaggattagatggattattttcataaatcttcgaaactgaacctggaatgacatttccagcttcgtccacttggataatttttcctagtgctttataagtaaccttatccgtaacttctggttgatctggagtaactgtcttagatccagcttccttcttatcagcgtagtaacctgtaactactggaactgtttctttaccataagtgtgatttggttgatcccatgttgtcgtaccatttttttgtttaccagtaaaggtgaagttatcttgaaccttatcacctggagtcttatcgcctgctccttcaaacttaactgtttgtttagttggtttagtcacatcatttacgattggaacgtagatgattggtgtgtcgtcacctgggttttcaggagtgattggtgttcctggttctactggtttacctggtttgcttggatcttttggatctggcaagtatggtttgtagcctggtacgtctggtacaactggttgacctggtttcgttggatctgttggatcatttggatatttcacatctggtgttgatgggaatttcggatcatcagatttcggaaccaagctaccaagcggtttgtaagtaacagtctcttcaagattttcttgagtaactgtcttagaagcaacacttcctttatcagcgtagtaacctgtcaatcctggtgttggaactgcatcatagttagccttattagctgcccatggttcatcaaggttaagaactttacctgtcaccttatcaagttttaaggtacgtatccattgtgcattttgaacattgtcagctggggcagttgccttaccgtctgataccacatacttaacagttgacgttacatctttcttccattgatcttccgcagggtatttaggactgtttggatcatttggattgattggttctgttggtttatgtggattgtttggtccaactggagtttcatcgtgtgctaacttaactacgaattcttgatctgtcgatgtatcactatcaaatttcttttgatcttctgttgcctttttgaatccatcttctacaagtttgtaacccttattaacaaaatcagcaatcttagctttagttgagtagttaatggcttcacctgatttaccagaaactgcatcttttgctaactccttatcattagcacttgtatcaatgtatttgataatagctttttgttctgccttgcggtatataacaggtgtatcaactcctgggttagatggagttacatttggaacgtctgtcacataacctgggatgactggtgttggagtcacgccacccttagttggatcttctgaatcattgttgtattgtggagttggtgcacttggaattggtgtattggtttcatcaactgggataatcttaccaagttccttataaaccaccttatccgtaacttctggttgatctggtgtaactgtcttagatccagcttccttcttatcagcataataacctgtaactactggaactgtttctttcccataagtgtgactaggttgatcccatgttgtcgaaccatttttttctttaccagtaaagatgaagttatcttgaaccttatcagctggagtagctgttcctgccccttcaaacgttaccgtctgtttagttggtttagccacatcgttttctactggagcaaccgctttatagtagtatataatttcattagttgcatttaaaaatggattctctaaaacctgagtataaggacgtttattagctgcagtaccattgtagtatgctgtttctccttttcctaaggttgtttcatgaatttttttaccactataatagacctcagccttcatagtaccatccatgttcagtaatgtatatttaatttcgaggttaggttgagtcacttttgtgaagctatcacctacttgtttccagggagaaatatatccatttggtgtaccaacgatttccttatcaacaagttcatatcctttcaactctgctgcagtcgtatcaaagcgcatgcccgttaaaccattaagggtataagaaggaaccaattctttcttagtatctttatccttaaaacttactgtaactgaattatttgtagggattaaccatccatctgcataaaaaggtccttggccttgtttatttgagatttctgggccgttatacaagatattaaagttagcgatctgattacgtgtcctagccgtataaggcatgtcaccgatagaaatggaatccacatttcgattaataatcaattttttattacgattaaatacaaattcacttgaatttgtatttttatccatgataatctcttgttgcaactgattattacggttataaaattccaattttaccgtaccgtcagttctataaccagttgaagttcgttctgatttagcagataaaactacatagccatcaaacgaatcaactacacggatattctgatttagacgttgttgatctaactgaacaaaggtataccagccatcactaccatcatgatatttagtagatgtatcatatccattcggacgtgacgagtcgcttgaagtattttctttcggaggcgtgatactaacacctccctcttttactactgcactagaatcaagatctcgacgagttcgtctcgaagatacatcagtatcagtagatgtacttctatcttctgaattagatttttctagttgattctcaactttttgatgctcaactttttccactgcattttctacagcagcattcacaactgaatttggtgtcgtctcagatgataatggttgagtttccttattattatctgaaccttgtaattcttttgactccacagctggactcactgcaggtgcttctgaagaagctggcgctgtctctgttgctggagtaacagaacttgaagccgctggcgcctctgatacgctacttgtagcaggtcccgcacttgtattcagtaatgactgtgtcgtctcagttgactcagttacaggtgcagaggctgataccggcgtgtcagtgttttcatctgcttgtgcacttgtaccaatcatgactaaggtaccaagtaacaccgaacaaaccccgatattcaattttcgaattgaaaatcgacttttcttcttgttgaataaatctttagacattattcctcactacaattggaaatctcactatccaattgcccttcctaaataatactctaacccccttttaattatattatcacaaaaatgtaaaatttcaacaaagaatgtaatctattcgttattttctgtttttataatgtttctgttattgtgttataaataatttctattaatctcttatatttgttctatagaagacttaataatctgaaaagttttttatttagtttttttaatatttattttagacttaaaagccaaaataaataaggggtacaaaacgaatataggctcagtctaagttataaaggtaaataatgaaaatcatctctccttgtccttactagctagtctaagtgcaaacaaagagatagccaatgaaagtgttgcccagacaagactatggtcaataaaagcgataccttctgtaaaacttaaagtagcattcatcatgacaataaatagccatacaatcacaataacaagggtcaacccattaataagatttgctttttgtttatccatatttttcttctccatatctggtcctttcaaaggttcattctaatccctgataagtctaaaggcagctattcttgagcaatcttttagataagatttgaagccaaaaaatacggctactctcttatttttctaaccttttagtagctaactttacagggcttgactttattatagaagctccattatcaaaaaaatagtgacatagatgtcaccataaatagctacgaaaaaacaagtccttatatgacttgtcccacaatccgcttatttctacgatgtctcataataagaaacaaaatcatttcaaaaaggagaaaactagcataaactcccgaaatataaagtaaggtttcccatttatccgttgttgattgaaaacgaccatgatgatccactgtgcgaatactgattaaaagacatatatctagaaacagggctagaagaataccgttaaagcctatgaaaaaacgctttttaaccataatacaactcctttttgtttttcttaactgtaggatagcaagctcaacttaaattagcctaaagcaaaaaaagactccgagagcctttttcctttatttcaatttttctttcaaatattgtccagtgtagctttctggaacagctgctacctcttctggagtccctgtagctacgatggtacctccaccgacaccgccttcaggacccaaatcaatgatatggtctgctgtctttataacatccagattgtgctcgattacgagaacagtgttcccatcgtccgcaaaacgctgcaacaccttcaagagacgcgcaatgtcatctgtatgaagacctgtcgtaggttcatctagaatatagaaagacttccctgtagagcgtttgtgcaactcactagctagcttcatacgttgggcttcaccacctgagagggttgttgctggttgtcccagggtcacatacccaagtcctacatccttgatagtctgtaccttacgagcaatcttaggaatagccgcaaagaagtcaactgcgtcatcaactgtcatatccagaatctccgcaatattttttcctttataacgaacttctaaggtttctgaattatagcgtgtgccatggcaaacctcacaaggaacataaacatcaggtaggaagtgcatctcaatcttgataataccatcaccagagcaggcttcacaacggccacccttgacattgaaagagaaacgccccttcttataacctcgaatcttggcctcattggtttgagcaaacagatcacgaatatcgtcaaagacgcctgtgtaagtcgctggattagaacgaggtgtacgcccaattggactttggtcaatatcaatcaaacgctcgatatgctcgattcctgtcactgatttgtgtttacctggcttctcactattacgattaagctcttgggcaatttttttcttgagaattccgttaaccaaagtcgattttcccgaaccagaaacacctgtgactgcaatcaactttccaagtggaaacttgacagacacattcttaaggttattttcgctagctcctgtaacctcgataaaacgaccattacctacacgacgttccgtcggtacaagaattgatttagcacctgacaaatattgcccggtgattgatttcttgttcttagccacttcctctggagttcccgaagccatgatttgcccaccaaaggcaccagcaccaggtcccacatcgataagccagtcagcctcacgcatggtatcttcatcatgctccaccacaatcaaggtattgccaaggtcacgcatctttttaagacttgaaatcaagcgatcattgtcacgctgatgaagcccaatagaaggctcatccaaaacatataggactccagaaagattagagccaatctgtgtcgccaaacggatacgctgactctcaccacctgaaagagttccagccatacgagagagagtcaaataattaagacctacattatttaggaaagtcaagcgatccttgatttccttaacaattggacgagcgatcactccctcgttttcacctaattcaaggttatcgatttccttaagatgatctgaaatagacaaatcagagatttgaccaatattgagaccattctcaccaccaacacgaactgagagtgctgcttcgttaagacgatagccatgacaagttggacatgacagctcattcatataacctcgcatgacattgcgagtgaaatcactattggtctcgtgatagcgacgattgatattagtcacaaccccttcaaaaggaatgtcaatatcacgcaccccaccaaaatcattaacataatggaaatggaattcacgatccccagatccgtagagaatcaaatcttgttcttcttttttaagatcttcaaatggcgtatccatatccacgccgaactgctccatagcctgctcaagcatagctggataatagttggacgaaataggattccaaggcgccagagcaccttcacgcaaggtcttactagcatcagggataaccaaatccatatcaacttccagtttattacccaaaccatcacaggtcggacaagagccaaatggcgcattgaatgaaaagagacgaggctccaactctggcactgtgaagccacaaaccggacaagaataatgttctgagtaaagcagttcattatcatccatggtatccacaatcaagtagccatctgctaaacgtagggccgcctccaccgaatcaaagagacgactacggataccatccttattcaccaagcggtctacaactacttctatattatgcattttagacttagacaactctggcacttctgtgacatcgtaaatctcaccatctacacgaacacgaacataaccgtccttttgtacacgctcaaaaacggccttgtgttgcccttttctacgacgaacaatcggcgctaaaatctgcatacgcgtacgctcaggaagagctagaacctcgtccacaatctgttccacagaggatgactgaatggccccatgaccattaggacaataaggaacacccacacgggcataaagaagacgaagatagtcattaatctctgttgccgttccgaccgtcgaacgagggtttttgcttgttgttttctggtcaatggagatggcaggactcaaaccatcaatcgagtccacatcaggtttctccatatttcccaaaaactggcgggcataagccgagagactttcaacataacgacgttgcccctctgcatagatggtatcaaaggccaaggaagacttaccagaacctgacaaacccgtcaccaccaccagtttatcacgcggaatctccacatcgatattttttaaattgtgagctcttgctccatgaatcactaacttatcttgcatttttttaagaggccctagcccaaaagctactgccgctcctttctacagacggatggaaaatccatcccgactttctctcataattataacaaaatttcaatttatccagcccaaaaatgtttcaaatgtagtataatggtggagtgtctaaaaaaggcaaggaacatcatcccaagcctcttttgacagcactaaaaaagctaagagcagtgttaattagacttaaaagcgattgtaaaaatccttttataatcaagatgccagcgcttacttaatgacgaaggaggggttcccattgaaacaaatgttcttatccaccggaaaagaattcaaagaaattgaaacattcgagcctggtgcttggattcatttggtgaacccttcccaagaagaagccatgaaggttgcagaacggtttaacattgatattcaagacctccgcgcccctctggacgtggaagaaacttcacgtatcgatgtcgaagatgactacaccctgattctggtcgacgtcccaacccaagaagagcgtaataacaaaagctactacgtcactattccattgggtatcatcgttactgatgaggtggttgttactacctgtcttgaggacatcagtctcatggataacttcctcaaccaccgtgtacgtaacttctacaccttcatgaagacccgttttgtctttcagattctctatcgcaatgctcaactttacctaaccgccctacgttctatcgaccgtcagagtgataaattggaagctcagttggaaaatgcgactaaaaacgagcatttgattgacatgatggaattggaaaaatccattgtctatctaaaagcctcacttaagatgaatgagcgaattgttaaaaagctaacaggtaacgcctctagcttgaaaaaatatatcgaggacgaggatctcttggaagatacactggtcgaaacccaacaggccattgagatggcaggcatctatgaaaatgtcttgaatgccatggctgaaacctctgcctctatcattggcaataaccagaacactatcatgaaaacactcgctctcatgactatggctctggacatcccaaccgttatcttctccgcctacggtatgaactttaaaaacaattctatgccactaaacgatttagataacgccttttgggtcatcttcttcatcgcagctttcgggtcatcctgcgttgttatctactttatcaggaaaaaatggttctaacatagagcctcttcttttccctaaactttaaaactaaaaaaataatactatttatcgaaaggtcatctcatggacatccaaaaactcaccaagaaaaaccaagaatttatccacatcgcaactaaccaactcatcaaagatggtaaatcagaccaagaaatcaaagacattcttggcaatgtcattcctgaacttatcgaaaatcagaaaaaaggaattacaggacgtggactccttggtgctccaactgtttgggctgctagtttctctcctgaaaaacaccaaaaacctgaaactgataagcctaacaaagaagtgccagaaacagataaaacaccttggaagatgtggcttgatacctcactcttccttctagccatcgttgctatcatgaacgcaatctttggtttctcaggtacacaaactagctacggtctcacaacccttctttcagtgtcattcattggaggccttgctatgtataccccttatcactacatctaccgtcacaataacaaaccaaaagaagaacgtccaaaatggtggttcagcatgaccgtcatcacactctcttttattgcatggtttgctctctttagtcttacagcccttcttccaagctacctcaaccctggtctttcaccaattgtgatccttatcattggtgtcattgctggtgttgccaaatacttcttcaaacgtcattacaacgtccaaagtacttacgcacctgcatcttaatcaatctcaacctcaagtacccttatgggtgcttttttacgtcagaaatcttgacacagttggctattctatactaaaatgttaaagttaatagacaaaagaaagaattccaatagatgcgtatcaaattccctctactaatcattgcttgctgcctattacttatggcttgtggccacaagaatactcagaaaaactatcaagcttactatagttttaacaatgtgacgacttccactcaggaaaaacagctagcaaaagccttaaaaagcaagggcatcccgacaaaagactgggacaatctagccccttatattagtcgttacaatcaggaaaatacaaacctccaacctgttgtcaaaaattggaccaaaagtaaaatcggcaaggatcaaaatcaattcgtcaccttccttaatgaaaaaactttcgaagataacaaatcacattttactgatgacttaaactgccgacgaacatcattcctccttcttcatgatcttattacaagttcagaggacctcaccaaattagacctcccccttcaaaatgaatttatagatcttaagtcacgccacaaagagctaaccgccaaggatcaagctctctatagtctcctctttggggataatattagctaccagtctacggatgaccttcttaaagcttggaaaaaagctggactcaagttcccagaaaaggttaaactcctctctgtctttcaaaatagccctggtgatgtcagcaatttccacacggctatagcttacgaaaaagatggcagtatctatgtctttgaaaagcaggacccaacacttccttatcgctggagccgcttcaataattgggctgacatcaaatcacactggttatccaatcgcttcaaagtcttcaaaaataatgttgatatcctcgttaacgaccaaaaatttgatgatttcttagaaaacgccctctttataccacaaaacaaccaactagctcctcaagacaaatgagagaccagttggtttttctttacgcttaactataagactaaatctctccatgtagccctagaaatgtctaaaatctacaaaatcaagacagaaaaaaataccctcaatcgagggcattattttagtcttcgtttacgtaaggcataagtgccataacgcgagcgcgtttaatcgctgttgttactttacgttggtttttagctgaagttcctgttacacgacgtggaagaattttaccacgttctgaaacgaaacggctaagaagctcagtatctttgtaatcaacatattcgattttgttagctgcgatgtaatcaacttttttacggcgtttgaatccgccacgacgttgttgagccatgtttatttctcctttatatatttaattcgttttgtccattattagaatggaagatcgtcatctgaaatatccattgggtttgaattaccaaatggactctcgtcacgaccgaagtttggtgtagattgcgcaggctgtgatccaccaaatgaaccaccagttgaagctccaccaccgaatgaatttgaattatcaaatcctccagcgttgtaagaaccaccactgtgaccttcacgtgccgcacggctttccaacatttggaaattatcagcgacaacttcagttacgtatacacgttgaccttgttgattttcatagttacgagtctgaatacgacctgtaattccaatcaatgcgcctttcttagcccagttagccaaattttctgcttgctggcgccagataacacagttaataaagtcagtttcacgttcaccattagcacccttgaagttacggttaaccgcaaggctgaatgttgcaacagcaacgttacttggtgtataacgaagttccgcatcacgggtcatgcgaccaacgagtacgacattattaatcataatctaccttcttacgcgtcaagtttaacgatcatgtgacgaagaatgtcaccgttgatttttgaaagacggtcaaactcgttaagagcaaaatcgttatcagattcaacgttaacaacgtggtaaagtccttcacggaaatcttggatttcgtatgcaagacgacgtttttcccaatcttttgattcaacaacagttgcaccgttgtcagtcaagatagaatcgaaacgtgctaccaaagcgtttttagcttcttcttcaatgtttggacgaatgatataaagaatttcgtatttagccattgatattttcctcctcttttggtctaatgactcatggtctttcgccacgagtaagtgaggtgcactcacaagatataattctaccaaagtttgaaagataatgcaaggaaaaagtaaagagttagaaatttgaatccctcagaaaaaaattaagccctatgcgttatcttttctcctgtcaaacttcatgctaaaataagggaatgctttatcataaaaagaaattaggggaaaaactagggcttccaacctttaaccactactataatatccctattacctccctagaatatgattttcaaaacctaggtccgagtgatgcctacattatcactttcaaacaggacaacaacctttttgttgtcgatatgacacatcagcttggtcataccagtcattttgataccgtctccctctttgaacaagacaagctcttatcaggtatcgctgctgtccctttagctgctgtccacagcattcaaatcttgagttttccagacgagttatactctctggattctagccagcatcttaaaaatctggtcgctctttactacaaggatgctgaaatcatgcgctacctcaagacgactaaaaatatcggtgatcaggtgacaagatatcaattagaggctaatcgactagaaagacaaggtaagagttttgacttcttcaagtacaccaatcgtggcaaaatacgagaagaaaacggtctatcggaagtatccagcaaggactacgacttcattcctgattttcatcccttcttaacctcaccaagaagccaacaggttttaagcgtcccagtaacctactgtgatgacaaaacgaaacagaccgctagaatagacatcatgggctggtacatcaaggaccagcagcttaagattcgttggaaacctaagtacatgcgcaaacgccgatggcgttcttcacgtatctcagttgacatcgttaccggcaactacttcttccaagggcaaatctatagagacagtagcgcccccatatttctagacaacctaagctttgataacaaggttcctaaaagtttcctgccacatctccagaaacagtaccaaatctttatggctctagtcgaagaacaaaaaagactggctctcctacgagaggtccagttgaataataaggattaagagtctttcactaaaatccaacatatcaaaaagctcattcttacacgctagaatgagcttttaagattcttcaattgtcattagaacatccttttggaattttgtaaaaaatattttcataaggaggagtcattgtgtgtcaccatttttatacctagcaatcatagattacctccatcaacttacaaataacatttttgtattgtaaattttctattacattggtatcactccctaagctattttatgcaataacttgaagtgtctccatttttataacgtcctaaattcatcatcatagtaatcacctctgattcgtatgatttgagacctatctccccattgaccactcaatgagacttacttgtcgccgttcttataacgacttacatcaaacatcaacataagcgtcacctcggtacttttttacaagatttaagcatttaacttttgtcgatagtttactcatttggcatcggtatcactccttaagctattttacgcaacagcttaagtgtctccgtttttatacctactaacatttctcatgagctttacctcactttttgacgttaatcttgagtttagctttcgatttctggtggtatcactcccttgtagctattttatgcaacatttttaatcgccgtttttatacctactgatatttttcatgaactcacctcgttcatcttaagaatataggatttacgtttcgtttggcatgggtatcactccttaggctattttacgcaacaacctaagtgtctccatttttatacctactaacatttctcatgagctttacctcactttttcttaagttaacagatttgagtttggctttcgacttctggtggtatcactcccttgtagctattttatgcgactgaattaatctccgttcttgtaacgtcctactgtcatgcggtcacgctcctcagagatgattggtaaagttacttgttttgcctactgttttgtttagagatcttagtctccgtttttgtaccttgaaatattgactctcaccatggcttttacctccttgatgaatccttatcttctttacactcttagtataatgtaaacgcttacttttgtcaatctttttaacagaaaaacgcatgattttttgaaaaaagatttctttgctacaatagagacatgttagatttaaaagaatacggcattatcatgtgggatgctgagaaaatcgcctcttttcgtcgtaccctcctggactggtacgatcgagagaaacgagacttaccatggcgtagaactaaaaatccctactatatttggattagcgaaattatgctacaacaaacccaggttcagaccgtcattccctattacgagcgctttttaaactggttcccaacagttaaggatttggctgaggctcctgaagagaagcttctcaaagcttgggaagggctaggttactattcacgtgtccgaaatatgcaaaaggctgctcaacaaatcatggatgactttgatggtaagtttccagatacttatgacaatattgccaaactcaagggcatagggccttatactgctggtgcgatttctagcatcgcctttgggctcccagaacccgctgttgatggtaatgttatgcgagtcatggctcgtctctttgaggttaactacgatatcggagacgccaaaaatcgtaagattttccaagcaattatggacattttgattgaccctgaccgtccaggtgactttaatcaggcgcttatggaccttggaactgatatcgaatcagctaaaaatccgagaccagacgaaagcccaattcgctttttctgtgcagcctatctcaacggaacttatgataaataccccataaaattacctaagaagaagcctaaacctatgcaaattcaggcttttattatcagaaatgcaaagggtgaatttctgctcgaaaaaaatatcgagggacgtctgctaggtggtttctggtccttccctatcatggaaacggactttattagccaacaactcagcctttttgaaaaagatgatagtattctcgagacagtctctcaaaaggctatttttgaggaaaattatgccctcaaaccagagtggacgagcagttattttacacctgtaaaacataccttcagccaccaaaaatggaccatcgagatggtagaaggtagcgttaatgacgacaaactcactaccgataaggagctatgctgggtagcggctgaggacttcgaccagttcccaatggccacaccacagaagaaaatgattaaaacttataaagacagcaaaaaaggatagcattgagtgctaccctttttcttatgcatcaagtttattgtgcttccgaccacgcaaagcaaggtatacctttgaaagaactactcccagaaagatataaaacaattccaaataagtcacattttttgacatcaaaaattcaatcataatacgacactcctttttagtaagaactcctgtctctgttctcagttatgcttctattataggtaagagggtcaataaaaaatagtgacataaatgtcactatagagaaaacaaaaaagccaaaacatttaagtttcagcttgggaattattagtctactttgtagaagaaataactatcatctgtggtgccataaagcgactgcccaccccagatacgatccttacttttatctgactgatcatcggctttctcatttggcgatgacattacagaaccagtcaaagatactcctttgggtaaaaatgctaatgttccaccaccaggaccaacttcttttggcacaagtcctgctttaaaaaagccatcagtaattttaccatattcaattgctacctttgccgtatacaatcctataaattggaattaatttacttcattgtctctttcttttttctacatttgtacacaataaaatggactatacaaaatataacgaacatagacgtgaaatttatccagatgtccatatacgcggactgagctaaattttctctaaagctcgtagaccatacataaaaaaatgcaagcaaaactgtcggtatgtacgaaactgcatatcttagaaccataggctttataatcagctctgtaacaagagcatatgccactacacctattaaaactatgattgctctgtctatttcgtgccagtttccgctcggatcctcatatattccgttatataaatacaaaatgctgtttagcaccgttacaaatgtatataaaaccgtatatgcgaaaatcaaattcttatatttatcctttttcattgcactactactccagaaattcaaatttgtttatctaattataaaataaaggttaacgattaatcaatttaattatataactaaaattagaaatgtttattccaaatttatttgagagctgttctaagttattccttcctttctaagttcatagattagaacttgtaacttgctcttcggatgaaagcctctgctaccggccaaggcttaaaaaaccaccgaatagttccacttcagcaccacctttgctagctgacccgactagcaagtctcattagtatattagctactggtcgggaacccctatctaatatagcactttagggggacttttttgatacatcgttaaaaacttttcggaaccactagcatatctggtggttttcaatagacaaaaaagccggacctcagtccagctttcatctgtctatttctatttagtcataaagtaggtgatgatcaccaatactgccacgatagctaggacaacggccagaaatcctagcatgtagcgcaagagaaaataggtaaatggaaaattttctttcatgttttactttgcctcataccatgtgcggccatcattctcatctgcaatgagagggacagcgagttcaactgcagcttccatggtttctttaaccaaggctttcatcgctacaagttcgtcgtttggcacctcaaggacgatttcatcgtgcacctgtaggagcatcttagttttatagccaccttctaccagagccttgtctaggttaatcatagcaatcttgaggatatcagcggcacttccttggataggagagttgatagctgtacgctctgcgaagttgcggacgttaaagttacgagaattaatatctggcaactcacgacggcggtgaaagagagtttctacgtagcccttatccttggcttcacgaactacattatccatataggccttgataccaggataacgttcaaagtaggtgtcgatatactccttggccttcttacggctaatgccaaggttgttagatagaccaaagtcagaaatgccataaacgataccgaagttaacagccttggcgttacgacgatcgttaggtgtgacatcctctggcttttcaataccaaagacacgcatggctgtagaggtatggatatctgccccctctttaaaggctgcaatcaaatgctcatctcccgaaatatgggcaagcacgcgcaactcaatctgtgagtaatccgagcttaaaagcactgcatcctcagtcgatgggacaaaggccttacggatgagacgaccttgctccaggcgaaccgggatattttgcaggttgggatccactgatgacagacgtcctgtctgagttagatcctgcacataacgggtatggattttaccatcctcaaggatataatcctgaagccccaagacataggtagactgaagcttagtgatttggcggtactccaaaatcttagctacgattggagcaattggtgctaatcgttcaaggacatccacagctgttgagtaacctgtcttggttttcttagtgtattccaaaggtagacccatcttttcaaagaggataacacccaactgtttaggcgagttaatattgaactcctcgcccgccatctcgtagatttcttgggtcaatttgtcaatgaccacttggttttccactgccatctcgttaagggtttgtcccttgaccttaataccagcgatttccatcttagctagcacatttgccagtggtaactccatgtcaaagagaagctctgattgaccgtgttcagccaacttttctagcatgaccggtttagcgacctgaaggaccttgacttttttagccaggtggctaagtaagacctctttttcaggaaccgcacgcttagctcccttgccatagaccacttcatctgtttccaacggtaggtccgtatagagacgggcaatggttgacaattcattatcctcaacggttgagaggagatacttagccagacgggcatcaaaattagccgtaggcaagtcaatccctagatggctcaaaaggaccttactacgcttgaaatcgtagatattaacagcttttgaaagagctgtctggaatgcctctgatttgagtaggtcagtatctgtagacgcataaatctgcttgtcattcccccaagcaaaaccgatgataggttctgtgtgataattgtcaccaagaatctcaaaatagaagaaatcatcagaactaaagtgacccgctgtcacttggctaggctcagtataggccacatcaaaatcctgcggcacagcctctccaccaagggcatttttgaactgaacaaagcccatcttgtcatagaaggccgccaatttttcaaggtcaggtcccgtaaaggccgtatcatctaagccaatttcaataggagactgggtatcaatggtcgccagagttttagaaaggaaggcttgctccttatcattgatgagattttccttcatcttggacttcttcatctcatcaatatgctcatagataccttcaagggaaccgtgttccaagaggagcttgagaccagtcttttcaccaatcttagtaacccctggaatattatcggacttatcacccatgagagccttaaggtcgatgaattgcgcaggggtaatccccattttctccatgaggtagtcaggtgtgaaggcctcaaactcagccacacctttcttcgaaatttcaacgacagtattttcgtcagtcagctgaatcaagtctttatccccagagacaacagtaatttgatagtcctcactggtattttcagccatcttagccaaggtaccgataatgtcgtctgcctcgtactgagccaagtcataataggcgataccacgtgcagccaacatctcacggatataagggaactgctcacggaattcctctggagtcttggcacgaccagccttatagtccgcaaacatctctgtacggaaagttgttttaccagcatcaaaggctaccaagatatgagtcggttggatacgctcaagcaggttgtccaacatgaggtggaagccataaatggcgttggtatgaaggccattattgttacgaaaacggtcaatttgattataaagtgcgaaaaaggcacgaaaggcaacggatgaaccgtcgattaggagtaattttttctgattagtcataggtttattatagcatagatgagagcattggttttaattgaaaatctcttattttagggagactcttttgtaaaaatagctagtcaacatctgatgacaaaagtccgcccataaaacgacctcaggcatttcccacctccacgccccataggcaaatgtgctataatagaagctatgaacacaaagattttagaccaattagaatttaacaaggtcaaggaccagttcacagaatacctgcagaccgaacaggctcaggcggagttacgtaacttggtgcctatgaccaatccagaaagaattcaaaatcaatttacagaaattcaagaaatggcagagattttcgtagagcaccatagctttgccattggtagcttgcgagatatttctgagcccttgcgtcgcttggaactggatgctgacctcaacatccaggaactcattgccatcaagaaggtgctgcaagcttcagctgaccttggtcgcttctacgctgaccttgaaaatgttgagctcgtcgctctcaaacgtcttttcgaaaagattgaagccttcccaagtctacaaggtagccttcaaagtatcaatgatggtggttttattgagcattttgctagccctgagttgcagaatatccgtcgtcaactcaaatcttgcgatgatgccattcgccagaccttgcaagacattctcaagaaatctggccacatgttggctgagagtttgattgctagtcgtaatggtcgttcagtgctgcctgtcaaaaatacctaccgtaaccgtattactggggttgtgcatgacatctcaagctctggaaacacagtgtatatcgagccacgcgccgttatacagcttaacgaagaaattacacaattacgtgcagacgaacgccatgagatggcccgtatcctgcatgaactatctgatcaactccgtcctcaagctgctgctatcgccaacaacgcttggattttgggccacatggacttcattcgaggaaaatacctctatctccaagataagaaggcggttattccaaagattagtgacaaccaaacactccaactgcttaacgttcgtcaccctctcttgatcaacccagtagccaacgatttacgctttgatgaggacctcacagccattgtcatcaccggtcccaataccggtggtaaaacggtcatgcttaaaactctaggattagcacaactgatggctcaatctggtcttccaattttggctgataagggcagtcgtgtggccattttccaagagatttttgccgacatcggagatgaacagtctatcgaacagagtttgtcaacattctctagtcacatgactcacattgtcgagattctggatgctgccgacagcaacagtcttgtcttggtcgatgagctcggggctggtactgaccctcaggaaggggctagtctagccatggcaatcctagagcacctccgtttgagccagattaaaaccatggctactactcactatcctgagcttaaggcctatgggattgagacgcaacatgtggaaaatgccagcatggagtttgacacagcgactttaagccctacctatcgttttatgcagggagttcctggtcgctctaacgcctttgagattgctcgccgcctcggtttgaatgaaattattgtcaaggaggcagaaaacctcacggatactgatagtgatgtcaaccgtatcatcgagcaacttgaagcccaaactgtggaaacacaaaaacgtctggaacacatcaaggacgttgagcaagaaaaccttaaattcaaccgtgcggtcaagaaactctataatgaattctcccatgagtacgacaaggaactcgaaaaggctcagaaagaaattcaagaaatggtggatacagctttggctgagagcgatagtattctcaaaaatctccacgataagagtcaactcaaacctcatgaagttatcgacgccaaaggaaaactcaagaaacttgcccctcaagtggacctctctaagaataaggtccttcgtaaggccaagaaagaaaaggctgcgcgtgcccctcgtgtcggagatgatatcatcgttaccgcctatggtcaacgtggtacgcttaccagtcaagccaaaaatggtaactgggaagcccaggtaggtctcatcaagatgacactcaaggcggatgaattcactcttgttcgtgcccaagcggaagcccaacaacctaagaagaaacagattaacgtggttaagaaagccaaaaaggcatctggtggtcctcgtgctcgtctagaccttcgtgggaaacgttacgaagaagccatgcaagagcttgatgcctttattgaccaagccctacttaataacatgagtcaggtggacatcatccacggtattggtacaggtgtcatccgtgatgccgttaccaaatatctccgccgtcatcgccatgttaaaagttttgaatatgccccacaaagtgccggtggttccggatgtaccattgcaaccttagggtaaaaatagttaagaaagactgagaccttgtgtccggtctttttcatatcctaccaaaacaaagaacaaaaaagtctcccttaatcaaggaagacttctattttctatatcacacttgtccacaaatgctggataatctgactaactggaaaataaccattaatcaagatacgtaaaacccagctcgatgacaagagcgtttgaatgttgttcataggaacagtcgcaagaatattccccaacatagtcaaaggcacaagactcactaaggtggccaagacaccacctaccacttggtaacgtctctgatcaagtcgctcaattctcacaaaatggaagaaaataccaagaaagcgtaagccataataggctatacagtagatagcaaaataagcaacgcccgcataatagacacggtcaagtgaaaagatgttctgatctttaaagaaagctatactagcatccttggttggattggtataaggtacccaaagattgatagcctctcctagcgaccggtagaaataggccgccacacacatggcgataatgactgaaaccacgtaataagcttgcataaagaggcctcgacggtagccaatgtagaaattccaagccataatggctaagacaaggagtccaatcatgcgtcatcctcatcgtcatttgtagctgtcgccttaaccttgagctgttcaagttgcttagctctcaacgtttccaactctttttccatatcttcaacttgaatttcgcgttccaactgagtcgacaaagaattgatagccattaggatagcgattgtttcattgtcagcatttttcatctgctctttgataattttatatttctcatgggcaacacgctccacctcttccatgaaaaggttgtccttatcagttgttagcgtgaggttcttctctccaaaatgaaatttgtaacggttcttatttgccatttgcttgttagctgccaatcaatggtggtcgcggattcgccaccgcagcttctccttattttattgcttttatatcgccattttttagcaagattcagatacttactctgaggcgtgttcgatacttaaatgccaacccattgcctctaattgtggaaaaaagagcatggttaggcattctctttctaatcattatatcctaaattttaactttcgtaaattttagactttgcacttctctagaaaaataattttcagagattccgagtctgtaaaatatctaccaattctccttttttgtgctaaaatagatttcatgggcacaatcgtattaaaaatgacagcagagcagatttcgacactccagaaggacctggcaagctatgcgactgcgactaaaaatccttatgcaagcttttcagccaaggtcgatggaataagtgtcatcgcctatacttcaggcaaggtaactttccaaggagctaagccagaagtcttggctagccgttttgggtaccaagctgaatctaagcattcacctgatgggcaaaacctagccctaattggatcagatgaagtcggaaatggctcctattttggtggtctagctgttgtagctagtctagttaccccagctgaccatgcctttttgaaatctcttggggtcgatgattctaaaaatcttaacgatatcaagattcgtcagattgcacctatattggaggagaaaattcctcacaaggcacttcttctttcgcctagaaaatacaatgaagtggtcggagacggtaagagtcataatgctgtatccgttaaagtagctctccacaatcaggctatcttcctattgttacaatcaggtgctaagccagacaagattgtcatcgatgccttcaccagtgagaaaaattatcaaaaatacctcaagaacgaacgcaatcgttttgactttcctatcactttagaagaaaaagccgaaggaaaatacctagctgtcgcagtgagttctatcatcgctcgcaatctcttcttggaaaatctggataaactcagccaagaggtgggttatacccttccttcaggtgctggtgctaagtctgaccaggtcgcagccaagcttcttcaagcctatggagatcaggctctccaagctactgctaaataccatttcgctaatactaaaaaagcctaccaacgcttaaaataaccctgaaaggccttaactatgaaaaacaaatggacccaatacttcctcattttacttcgtgaatggggactctttatcctctttatcacatttttccttttgactcgcctcttcctttggctccctgtccaggttgacggccactcaatggatcctactctagccaataatcaacgtgttatcgttttgaaacacacatccattgaacgcttcgatattgtcgttgccaaggaagtcgaagacggtaagtcgaaacaaattgtcaaacgtatcatcggtatgccaggtgataccattacctatcaaaatgataaacttactgtcaacggtaaagaagtcaaggaagaatacctcaaagaattccaagctgcctttgccaaggataagctacaaaaagaatatgcttacaacgatgacaagagcaagagtggatacttccaacaactagctaaggatgccaaggcctttacaaccaatgctgatggtaacacgaccttctctgtcactgttcctgaaggcaaatatttcctacttggagacaaccgtattgtttccaaagatagccgagcagttggtttctttgacaagagtgctcttgtaggagaggtcaaattccgcttctggccacttaataaaattggtaccgttgaggacaactaaaaacactaaataagataaggttggggaaacccagccttattatgtatctaggaaaaacacatgcaagaattttatttttcaggaactatcgaacgcgtcatttttgaaaacgctagtaatttttttcgtatcctactcttagaaattgacgaaacagacagtgattttgaggactatgaaatcattgtcacaggaaccatgggagatgtcatggagggcgaagattataccttctggggtcagctaaccaatcatccaaaatatggtgaacaactccaaatgacgcgctacgaacggtcaaaaccttctgctagcggtcttatcaagtatttctccagcgacaattttaaggggattggtaagaaaacagctgagcgtattgtcgagatctatggcgaagacccaattgacaagattctcgaggatcctagcaagttagaacagattcctaacctttcaaaggtaaaccgagaagccttcgttgcaaagttaaaaatcaactatggaaccgagcaaatcttgtccaaactttccagctatggactcacaccaaaagctgcctcacaaattttcaatcaatataaggaagaatcgctcaaccttatcgaggaacacccttatctcttggtagaggaagttcaaggaatcggatttaaaatagctgaccaactagccgaacgcttaggaattgctagtgatgctcctgaacgtttacgagctgccttgattcattgtctgctagaagctagcatggaagaaggcgacacctatatcgaagccaaatccttgcttgaacgaactatcatccttttggaaagtgctcgtcagattgaacttgaccccgccttagtcgcgaaggaattaaccaatctcatccaagaggacaaagtgcaaaatatagagactaaaatctttgataataccctatattttgcggaacagggcatctatacccacctaactcgtatcatgaaagaccaacctgacatcagtgcagaggacaaaatccaagcaagtcttgaagaggtggaagaggagcttggtattacttatgataaggttcaaaaagatgccattatcaaagccctacaaagcaaggtcttcatcctgacaggtggtcccgggacaggtaaaaccaccgttattaacggaatcattaaaacttatgccgaccttcatggtctagatctcaaaaagtctgatttgcctattattttagcggcaccaacaggacgggctgctcgtcgaatgaacgaactcacccaactccctagtgccactatccatagacatttgggactcaatagcgaggacgatttcaagaccttagaggactatctcgattgcgacttgattatcatcgatgagttttctatggttgatacttggttggccaatcaactctttgaaagtatctctgattcaacccaagtcgtcattgtgggtgaccaagaccaactgccttccgtaggccctggccaggtcttggctgaccttttgcagattgatgacttgcctaaggtttctctgaccaaaattttcagacaatctgaggactccaccatcgttaccctagctagtcagatgcgtcaaggccaactacccgctgatttcacagagaaaaaggctgaccgctcttactttgaggccaatgccaaccatattccacagatggtccctaaaattgtctctgccgctataaagagcgggattgctgctcaggatgtgcagattctagctcccatgtatcgaggacaggctggtattaacaatctcaatactattatgcaggacctacttaatcctcaagaaaaggccaatcaatttgcctttaatgacattttcttccgtaagaacgacaagattctccatctggtcaacgatactgaactcaatgtcttcaatggcgacatcggcatcattactgatctcatccctggtaaatatactgaaagcaagcaggacgaaatttacatgtcctttgatggcaatgaggttatctatcctcgtaacgaatggaataagattactctggcctatgccatgtcaatccacaaatcccaagggagtgagtttccagtcgttatccttcccatcacacgccaaagtggacgtatgctacaacgtaacctcatctacactgctatcacacgcgccaagagtaagctagtcatgttaggggaaatcgcagcctttgattatgctgttcacaacgagggggctaaacgaaatacttatctcatccaacgttttgaacaaacttatacacaagctgttgataagtctgtcgaaaagattgttaaaaacgaggcaacaggcgcctccaatcaaacaaaaacgaaaaacaacgacccctcagaaacccttgaaaacaaagacttttcggaaaatatcaatccatccccagatcttgttaacacttattcacaacctgtggataagtctgttaacaaacctgtgcaaacagaagaaaactatcgtttaactgaagaaaattggacaactatagatccaatgattgggctcagtgaagacgatattgccgccttttttaacaataactaaaaaagacttggaaagcgactcactaagagcaactccaagtcttttcatttgctaaaatacgaaacgaatcagggccatagatattataccaacgattactgcatagagcagatttttgctcttaaaggctacaattaccgttggcacagtagccaggatttccatccacttaaactgtggcaagtgaccaatcttctcagtcgtgagactagagagaatcagagcaaagaggatagaaactggtaaatagtgcaaaaatcgaacaacgatatctggaagccccttgtatttcactaaaacaaagggaagcacacgaggaacccagctgaccacaaacccaagtagaatagcaatgagaataaacttattgacggccatcacacatcacccccacactacatccaaccaaagtagccactaaaacagccaaagattccgacaagatgacactaaagctcagataagccacagcaatagatagtaaaatcaagagtagcttacgcactccttcccctaacaagacatcaatctgactacttaacaaaccaataaacatggcaatcaaagcaaaatccaaaccaaatagctcaggattaggaatcatggaaccaatcaaacaaccaacaactgatgatacaatccaaaccagatagctaaaaatattgttaccatgcatccagttagcaggaatatctttataatgcacatattctcccaacaagacaccataactttcatccgtaatcagactaccaattcccagctgattccaaaggcttgtttttgtaaaaatcgtcgttgcatgtaaactcatcaacatgttacgcaaattaaccaagaaaacagtcaaggttaactcacctaggccagctcctgcaactactaaggcacacatggcaaactgggccgagccaccatagaccaaggcacacatgagaccaacctcaagggctgatagacccgaagctgctgctacaacaccaaaagctagaccaatagctacatagcccaaagctgtcggtaccgcggcttttacacctaaacgaaagtcagacacactcaattcctttctaaaggaacctcttaccaaactagtaagaggttcttcttattcttcaaatcctgcaaaggctagacttggttttgcattcaagtccaactcagcaaaatgtttttgatcacattcaatagcggctgctagagcaatcatgccagcattgtcaccacaaagacgtaaaggcggaatgactacatctacatctgtgatttcttcagccaaacgttctcgtaagccctgattagctgccacgccacctgcaacaacaagtgtcttgacaggataacgctccaaggctttcttagtcttagctaggagaatatccaacacagcagcttggaaggaagcacaaaggtcttctttgactagtacttctcccttctgttctgcattgtgatgcaaattgatgaaagctgacttcaggcctgaaaatgaaaactccaagtggtcttccttaatcatagcgcgtggaaaatcataaacatctttccctttatgagccaattcatcaatttcacgcccggctgggtaggtcaaccccatcacacgcccgaccttgtcataggcctcaccaactgcatcatcacgtgtctcaccaacaatcttgtaattccccggttctgacacataaaccaactctgtgtgtcccccagacaccaaaagtgctaagaggggatattccaattcttgaacctcacgcgctgccataagatgcccagccatatggttaactggaatcaaaggcaacccatgtgcccaagcgaaggccttagccgctgccatcccgaccaagagcgccccgaccaaaccaggaccataggttactgctacagcatctagttgttcagcagtaattcccgcctcagaaagggcatctttaatgcaaagagtcaccacttccacatggtgacgactagccacctcaggaacaacaccaccaaaacgtttatggctttccacctgactggcaataatattacttaaaagtactttctcatttttcaaaacggcaactgaagtctcatcacacgagctctccactgccaaaatatatctatctgccattagacttcctctcgcctcatgataactgcatcttcttgaggctcatgataataatttttccgaattcctagactttcaaaaccaaattttctataaagtgcctgagcgacttgatttgaagccctcacttctaggaatataggttcactacgctcttccaaatgcttcatcagctgactagcataaccacgcccctggtaagcttttaaaatggcgatattggtcacctcaagctcacccactaaattttgaagggctaaaaaaccaacaacttcttcctgatcataaacatagaaatactccgtagtatccaaagccaagtctgctaccacttgttctatcgtccacggagatttgtcataaacatccgacaaaatccgataaatcagttgagcttgctcttggctactcaatctagacgcgcttgatgtagttgtcacggttagtctcctcatgcgtcttaagccaattctcctccgcctcaactcgcttcaagtaatgtggaacaaaagcatctacatcaacagaaggcaaggacaagcctaaacgaccaattaactgggcagacggaagacttgacaagatagttgcttctggaaggctttctttaatctgatccacaaaattagccacttcaccgacaaatgtcaccttttcaaaagttttagcttgctccagaacatctacaaaagatgcatggcaatctgggacgagggcctgaccattttcataaaaaccaacgtaaacattattacgacgagcatccatgataggaatcacaacaccgtcaactgtaaggtctgtcagtgcctgtagacttgaaactcccaccaaatcaatgtcgagggcataggctaaagtcttagctgttgcgacagccacacgaagccctgtgtaggatccaggaccctgtgcaaccacaatacgttctaaatcagacggttgccagcctgcctgagcaactaaaaaatcaatggtgggcattagactaatactgtggttcttttttactgtgacagttgactctgccactagtttctcatcttctaacaaggctactgataaagctgtgctagaagtatcaaatgctaatattttcatcttttttccttgtttccttttatgcttttctattataacacaagtcactgtttcccagaaacgaacattttccaactttttccgccattttctttatctagcccttatcttatggtacaataatagtaattgttaaacgaatcaaggctactagctattactcataaagtgaatatcataacgtcaagtaaatcatagaaagattaacttgaccggtttttttatagaatggcagagccttttggaaagaaaggaaaaccatgatttataaagtcttttaccaagaaactaaagagcgtaatccacgccgtgaacagacaaaatcactctacctagatatcgatgcagaaactgaacttgagggacgtatccaagctcgtaaaatcatcgaaaaaaacactgcctataacatcgaattcatcgagctcctctcagaaaaagcccttgaatacgaaaaagaaacaggcgtttttgaagtaacggagttctaagaccatggcatcaaaaatcaatctaaaacctgaagaagttggggtttatgcgattggtggtttgggggaaatcggtaaaaatacctatggtattgaataccaagatgagattatcatcgtcgatgcgggtattaaattccccgaggatgatcttctcggaatcgattatgttatcccggactattcttacatcgttgaaaatgttgatcgtgtaaaggcacttgtcattacccacggtcacgaagaccatattggtggaatccccttccttcttaaacaggcaaatatcccaatttatgcagggccacttgctcttgctcttatcaaaggaaaattggaagaacacggactacttcgtgacgcacaactctatgaaattaatgctaatacagagcttactttcaaaaatatgagcgtgaccttcttccgcactactcactcaattccagaacctctcggtattgtcatccatacacctcaaggtaaaattgtgtgtaccggtgactttaagtttgacttcaccccagtaggtgagcctgcagaccttcaccgtatggctgcacttggtgaagaaggcgttctttgcctcctctcagactcaaccaatgctgaagtaccaactttcacaaattccgagaaggtcgttggtcaatccatcatgaaaattattgaaggcatccacggacgtattatcttcgcctcatttgcctcaaacattttccgtctgcaacaagctgccgaagccgctgtaaaaactggccgtaagattgttgtcttcggacgttctatggaaaaagccattgtcaatggggttgaactaggctacatcaaagttccaaaaggaactatcattgaccctagtgagatgaaaaactaccatgccagtgagattcttatcatgtgtaccggttctcaaggagagcctatggcagcccttgcacgtatcgctaacgggatgcaccgccaagtgacactacaacctggtgacactgttatcttctcatctagccctatcccaggaaacacaaccagcgttaaccgcttgattaatactattcaagaagctggtgtcgatgttatccacggtaaaatcaacaatatccatacctctggacacggtggtcaacaagagcaaaaactcatgcttcgtttgatcaaaccaaaattcttcatgcctgttcacggtgaataccgcatgcagaaggtccatgcaggtcttgctgttgattgtggtgttccaaaagataatatcttcattatggaaaatggcgatgtcttagccctaacaaaagactctgcgcgtcgtgcaggtcacttcaatgctcaagatatctatgttgatggtaatggtattggggatatcggagctgccgttcttcgtgaccgtcgtgatctttctgaagatggtgtcgtacttgccgtagcaactgtcgacttcaagtctaagatgattctagccggtccagacatcctcagtcgtggcttcatctatatgcgtgaatctggcgatcttatccgcgaaagccaacgcattctattcaatgctattcgtatcgctcttaagaacaaggatgctagcatccaatctgttaatggagctatcgtcaatgctttacgcccattcttgtatgaaaaaacagaacgtgaaccaatcattattccaatgattctcacacctgataaataaaaaaatggtggctggatggctaccattttttagtttaaatacagtctggagcacaacccttccagcaagtaaaaaaagcgcttataacgcttttttcattttatgcacctggataaatgtaagatactgaacctggtgtagttgagttttgtgggtcaaaccaaccacgatagttattgatttgttgctggttgttatagtttgactccaagatttgaatttgaccatcttgaccaacttctgttacataaccaacgtgaccataaccaccatcagtccaacatacaattgatcctgtcacaggtgttgaacctacagcataaccttggctagcagcgcttcctgcccaatcgccaccattaccccaccagttacttgcccatggagcgacttccttaacaccccatgtacattgcccaactggataacgattccaagtagcatctgaatcagtagctgctacctctgaagaagaagcttctgttgtttcctcaactgctgtcgtagcacctgaaacttccaagcttccaccaggaacaattgttgaccaaatagtcatgccattttcagctgccaattgataaggatctaccccatactgactagcaatcccgaagaatgaatctccattttgaactgtataagtatcagcattaactgtttgtgcgactgtaagaccgagcaataatgcacttgaggctactgccaaagcagctttttttgtagttttcatatttccccctgaataagattaatataaaattagtttaacactctcatattttaatgcgattaagggagaataaagaaatatgacaaaagaaaacagctcagttaaaactacgtaatttgtccaagaacttaatgaatttagaataaaaagaaaaccaggcataacctgatcttcaaatttaatttattaataaatgtccaagtagttatcaatttcccattgtgaaacaaaggtagcataacttgcccattccatacgtttcgcatcaaggaagtttgtatagatatgattacccaaagcttgacgaaccacttcatctgtttccaatgctttaagagcgttacgaagtgttgatggcaaatcaataataccagcctctttacgttcttcaggagacattgagtagatgtttgtttcaactggatctggagcatcaatcttgttaataataccatcaagaccagcttccaaaagaactgcaagtgccaagtatgggtttgccattgggtctactgaacgtaattccaaacgtgtacccataccacgagacgcaggaacgcgaatcaatggtgaacggttgctacctgcccatgcaatatatacaggagcttcgtatccaggaaccaaacgtttgtaagagttaactgttgggttaataattgcagtatagttgtatgcatgtttcatcaaaccaccaaggaagtagtaagcatcttgagacaattgcataccacgtggatcctctggatcaaagaatgcatttccttcttcagtgaagagagacatgttacagtgcataccgctaccagcaataccatatttaggtttcgccataaatgtcgcataaagaccatgtttacgagcgattgtcttaacaaccaatttgaaaatttggatattatcacaagccttcaaaacatctgtatacttgaagtcgatttcatgttgaccaacagccacttcgtggtgagatgcttcaacatcgaatcccatttctgtcaacacattaacgatttcacgacgtgtgttatctgcaaggtcagttggtgcaaggtcaaaataaccacctttatcgttaacttcaagtgtaggattaccttgttcatctaatttgaaaaggaagaattctggttctggtccaaggttaaatgatttataaccaacttcttccatatgacgcaaagcctttttcaagttaccacgagggtcacctgcaaatggttcacctgcagaggtatagatatcacaaataagaccagctactgcaccattttcatccccccaagggaaaactgtccacgtatcaagatctgggtaaagatacatatcagattcgttgatacgaacaaatccctcgattgatgaaccatcaaacatagctttatttgaaagtaccttatccaactgttcatctgtcgcaggaatttcaacgttcttcataacaccaagaatatcagagaacattaaacgcaagaaagtaacattcttctctttgacttcgcgacgaatatcagctgctgtgattgccataataggggtctcctttataaaaaccaaaaataaaagttcaaagcgtaattagatacgcaagttaccaaattgttgtgacggggtcgtaaaacggccttgctgaaggagttcatcatgcaagatacgtcgaacgtccgcatctgttaaagccgcttgtttttgttgggcacgaacttcacgctcttcgtactcatgcttaatcgctgcaatattgtaaccatcatccaaaaaatctttgatttccaataaacgatccatatcatttaatgagtacatccgacgatttccagctgtacgttcaggttgaattaaaccttgatcttcatagtaacgaatttgacgagcagttaaatccgtcaatttcataactgttccaatcggaaaaacagctagagaacgccttaattctttctctcttgccatgatcatcctcctttcctaacaattatattctgaatatttctacatgtcaacagtttatgttactttttcttacacaatgagcaattcccgaacattatattgtatattcgttctaatttaaggattttatcaaaaaaacataaaaaagagagttcaattgaaccctatcattcttattttaagtgtttaagtaaccaatcataatcataattgacaaggattgctataaagactccacagaaagtttcaaagactcgtgcaataacataagtaaaggtattatcaggtggaatagacaaagtaataatcagaagtgcagccacccctccaataacaccagatgcattattaaaagacacattaatgacaatcgtcagcatggtcaaaattggaaccaatagcaaggtaacccaaactgaatgattaaaccacatattcacaaagtaaaataatagcgacaatagccctccaaccgtattcgcaaaaatacgtgatttaccaaactgaatacttctatcaaagttttctcgaaggctaaagactgctgtcaaacaaccaatctgaagcccttcccagcctaaagcagaaaaaagacctaaaactagaaagacagcaatccccgtcttaagtgtacgcataccaaatttaaattttttcggttcaaatttcaatcccattttactattttaacatgattatgaaacttttggctacttctacagtattatgccgtaaagttcaaactaataatcgcaattttttgagagaaatttacttcccaataatagttttaacctctatcaaacaaatactcaatgagataatacaaaaaagagttggttccccaactcttttcattctaatagacttatttatcagtaagtgcagccaatcctggaagttctttaccttcaagaagttccatagaagcaccaccaccagtagagatccatgagaatttatctgcacgtccaaggttgattgctgcggcagctgagtcaccaccaccgatgattgatttaacgcctggttgtttcacgattgcgtccatcacaccgattgtaccagcttggaagtcagggttttcaaatacacccataggaccattccatacaactgttttcgcaccagtcaaggctttatcgaattcagcaattgatttaggaccgatatccaaaccaaggaaacctgggtctactgcttcaccttcagtgtctttcacttcagtgtagtcagcaaatgcattagcttcttttgagtcaactggcaagatcaatttaccgtttgatttttcaagaagagctttagcaacatcaagtttatcttcttctacaagtgagttaccgatttcgataccttgtgctttgtagaatgtgtaagtcataccaccaccgataagaactttatcagcttttgcaagaaggttttcgataacaccaatcttatcagatactttagaaccaccaaggatagctacgaatggacgttctggagtttcaactgcttctttgatgtaagcaatttcgttttcaagaaggaaaccagcaacagctttatcaacgtttgctgagataccaacgttagatgcgtgtgcacggtgagctgtaccgaatgcatcgtttacgaagataccatctccaagtgatgcccagtatttaccaagttcagaatcatttttagattctttcttgccatcaacatcttcaaaacgagtgttttcaaccaagagaacttgtccatcttcaagagcgttaacagctgcttccaattcagcaccacgtgtaacacctgggataaatttaacgtcttgacccaatttagcagccaagtcagcagctacaggagcaagtgatttgccttctttatcagcttcttcttttacacgtccaaggtgagagaagaggattgcacgtccaccttgttcaagaatgtacttgatagttggaagggcagcagtgatacggttgtcgttagtgatcacgccatcttttacaggtacgttgaagtcaacacgaacgagaacttttttccctttcaagtcaacatctttaacagtcaatttagccatttgatcagactccttaattttttaatacgttttcattatatcacaaaatgcataaaagagatagcaaaatcagaaggatttctagcttattgctagtataagacatttagcatataatctaaatagaaaggtcgaatatccatgaaaaaacagctaaacaagaagcagaaacaagctgaccatgatctaaatgtaatccttattcttacccttgttcctctgctcctctttcttactcttaaaccaactcttttttcatacactaaccaaacctcagtaccgctatggctgcgattaatcttattagctagttgtcaatttgccatcgcaggcttaggaaccagcactgttatgctttatcgcaaagaatctttcagacactttggattaatcaccaaaaatctagttaccaccctttttcaatctcttcttgtagccctaccacttatcatatttaaaggaattactcatcagattcattcctatctacctcttcaatcaatacaattaacaaaagaagtaatgagccaatcatttcctagtaatatcctggcatacctattcatctgtcttatttggggattctgggaaggatttaactatgtagtcatcgctgaaaagatacgcatacgttttccatctccttacatttggttagatagtggggcaataacttgtgcgattttttgcctccttatccatggaatcattggttttgatgtctataccctatttgaatcacttaccgtttttatacttatttatggtatgctagctatacaaaaacataataaaaacgcctggggttgtgtcatgctctttctactcatttggaatgccttctagcttattcataaatcacaatcctactgagattataacagcctatttatacggctgttttattattttggaaaataaaaaaagagccgaagctcttctttttatacaattgaattatttagcgattttcgcgaagtattcaagagtacgtacaagttgtgaagtgtatgacatttcgttgtcgtaccaagaaacaactttaaccaattgtttaccatcaacagtttgtactttagtttgagttgcatcaaacaatgaaccgtaagaaatacctacgatatctgaagatacgattggatcttcagtgtaaccgaatgattcgtttgaagctgctttcatagctgcgttcacttcatcaacagtaacgtctttttcaagaactgctaccaattcagtaactgatccagttggaactggaacacgttgtgcagcaccgtcaagtttaccgttcaattctgggataaccaaaccgatagctttagcagcaccagttgagttaggaacgatgtttgcagcaccagcacgtgcacgacgaaggtcaccaccacggtgtggtccgtcaaggatcatttggtcaccagtgtaagcgtggatagtagtcatcaaaccttgtttaacaccgaagttatcttgcaatgctttagccattggagccaagcagtttgtagtacatgaagcacctgagataactgtttcagtaccatcaaggatatcgtggttagtgttaaatacgattgttttaacatcgtttccaccaggagcagtgataacaactttcttagctccaccttcgtgcaagtgtttttcagcagcatctttcttagcaaagaaaccagttgcttcaagaacgatttctacaccgtcgttagcccagtcaatttgttctgggtcacgttcagcagaaactttaacgaatttaccgttaacttcaaatccaccatctttaacttcaacagtaccgtcgaaacgaccttgagttgtgtcgtatttcaacaagtgtgcaagcataactggatctgtaaggtcgttgatgcgtgtaacttcaacaccttctacgttttggatacgacggaaagcaagacgaccgatacgaccgaaaccgttaataccaactttaactaccattagtgatttcctccttatgaaaatcaaataaatataattttgagagcaagctctccctattgtgaaaagattaacttgagcgctttcaatttaacctttcaacagtgatattatataatttttttcaaaaaattgcaaatagaaaaggcacttactttcataagtaccttaactttataagttctaattaagcttcaccagaatttttcttgatgatttcttcttgaactgatttaggaacatcttcatagtggtcaaataccatcatgaatgtaccacgaccttgagttgcagaacgaagtgttgttgcataaccgaacatttcagcaagtggaacatatgcacgaacgatttggctgttaccgtgtgcttccataccatcaacacgtccacgacgagctgtaacgtgacccataacatcaccaaggttttcttcaggaacagtgattgttacaagcatcattggttcaaggatagttggttgtgcagtcttagcagcttctttaagtgcaagagacgcagcgatcttgaaggcagtttcagatgaatcgacatcgtggtatgaaccatcgtaaagcttagctttgatgtcaaccattgggtatccagcaaggacaccgttagccatagattcttccaatcctttttctactgcagggatgaattcacgtggaaccacaccaccgacgatagcattttcgaattcgaaacctttaccttcttcatttggagtaaattcaatccaaacatcaccaaactgacctttaccaccagattgacgtttgaagaatccacgtgcttgtgttccagcacggaatgtttcacggtaagatacttgtggagcaccaacgtttgcttcaactttgtgttcacgtttcaaacggtcaacaaggacatcaaggtgaagttcacccataccagagataactgtttcaccagtttcagggttagtttcaacacggaatgttggatcttcttcagcaagtttttgaagaccgatacccatcttatcttggtcagctttagtcttaggctcaaccatcaattggataactggttctggaacttcgattgactcaagaataactttagctttttcatcagtcaatgagtcaccagttgtagtatctttcaaaccgatagcagcagcgatatcaccagcgtatacttgttcaatttcttgacggctattagcgtgcatttgaaggatacgtccgatacgttcacgtttacctttagatgtgttcattacatatgaacctgattgaaggatacctgagtaaacacggataaatgtcaaacgacctacaaatgggtcagtcatgatcttgaaggcaagagctgcaaatggctcatcatcagatgctggacgagtttcttcttcgtctgtatctgggttgatacctttgattgcagggatatcaagtggacttggaaggtaatcgataaccgcatcaagcatcaattgaacacctttgttcttgaaggcagaaccacaaagaactgggaagaattcaacgttgattgttgcacgacggatagctgctttcaattcctcgttagtgatttcttcaccttcaaggtatttcatcatcaaatcttcgtcagtttcagcaactgcttcaatcaatttttcacggtattcgtttgcttgatcaacgtaatcagctggaatatcttcttcaagaatatctgtaccaaggtcattagtatagatttcagctttcattttaatcaagtcaatgataccacggaaatcatcttcagcaccgattggcaattggattgggtgtgcgtttgcttgaagacgatcgtgaagtgtgcttactgagtaaaggaagtctgcaccgattttatccattttgttggcaaatacgatacgtggaacaccatactcagttgcttgacgccaaactgtttcagtttgaggttctacacctgattgtgagtcaagaacggttacggcaccatctaatacacggagtgaacgttgtacttcgattgtgaagtccacgtgtcctggtgtatcgatgatgttaacgcggtgaccatcccattgtgctgttgtagcggcagatgtgattgtgataccacgctcttgttcttgctccatccagtccatttgtgatgcaccttcgtgagtttcaccgattttgtggattttaccagtgtagtaaaggatacgctctgttgtagttgttttaccggcatcgacgtgggccatgataccgatattacgagtttttgcaagtgaaaattcgcgtgccattaggtttattctcctataaatattttagtttacttatttattataacattattgtcaaaaaacggataggcaggacctacccgttttttcactaatatttaactggttttcaaatgatatgaataatattatttgaattcagagtcagcctattacaaatccataatcttagcttatgaatatatgactgtaattcagcttgaaacttatgattaccagcggaagtgtgcaaaggcacggtttgcttcagccattttgtgagtatcttcacgtttcttaactgatgcaccagtgttgtttgcagcatccatgatttcttttgcaagacgatctttcatagtgtgttcaccacgcgcacgtgatgcgttaaccaaccaacgaagaccaagagttgtacgacgttctggacgaacttcaactgggacttggtagtttgaaccaccgacacgacgtgcacgtacttcaagtacaggcatgatgttgtccatagctgtttcaaatacttcaagagcatcgtttccagttgcttctttgatttgctcgaaagcatcgtatacgattgttgcagcagtaccacgtttaccgtcaagcattacacggttgataagacgtgtaacgatttttgaattgtacaatggatctgccaatacttcgcgtttaggcgctctatttttacgactcattttatcttatctcccttcttatcctttaggacgtttagcaccgtatttagaacggctttgtttacgatcagctacacctgcagtatcaagtgcaccacggacgatgtggtaacgtacccctggaaggtcttttacacgtccaccacggataagaacaacgctgtgttcttgaaggttgtgtccgatacctgggatgtaagcagtaacttcgataaggttgctcaaacgtacacgagcgaatttacgaagggctgagttaggtttcttaggtgtcattgttccaacacgtgttgcaacaccacgtttttgtggtgaagatacgttagtttgaacttttttgtggctgttgtaaccaacgttcaaagctggtgatttagatttaacaacttttgattgacgtggtttacgaaccaattggttaattgtaggcatctacattctcctgtgttttttatttttggttgatatggcacttggtgacagcccatatctttgtgtacttttgcaacttatgtcagcacgtctctgtacacttttgagagaccaaaagtaaaaagtaccgtctaatatagtatcattttttgatgattattgtcaagactttcttgttaaaaagaaaaattcctaatcgttaaattaggaatactatcgtagattaattatttatcaaaaatattaccgacttcaacttctaccttctgtgcttttacatcgatgtcagaaacagtaagtaatgatttatattcatggatatcacgatcgcctttagcattttctgcgaatacagctacacctactaactcactatcaaattctgaaagcaagctaatcatacccgtaatggtaccgccacctttaagaaaatcatcaacaataaggacgcggctatttggtttcaaactacgttttgaaaggaacatcttttcaatacgatcacttgaaccactaacgtagtttaccgatacggttgaaccttctgtaattttcaagtcacgacgaacgataacaaatggaatgttcaagacatctgctactgcatttgctaaaggaactcctttagttgcaacagtcataacggcatcaattttttgtcctttaaaggcactggcaatgatacgaccaacattttttaaaatagacggtgtactcagtaaatcagataggtagagataaccacctggtaagatacgatcactctcggaaagacgtttacaaagatcttcaaccagacttcttgcatcttcatcagaaatagtcggtgtaaacataacgccaccagatgcaccagttactgtttcgatttctcctatttgactttcctcaaaagcttttttaatgatagcaacatcttctgagattgaagactttgcagcttcataacgctctgcaaaggtgtttaggcttgtcaattgataaggattattaatcaggtagtttgaaataactaccatgcgctcacttcgttttaatttcatatgttacctatattttctgtactttttaactattataccataatacagcaaaaaacgaacattttcatatgaaatgctcgcttaatttcgattttaatcaaattttggcttgtagaaggaacgattatccatagcaaagagacgatttgtcatttctcctggacctactaggttaagggctgtcgtcatcatcatcatactggcatcaagattatcaatcatatgaataatttctgcttccataatacgggggcgcactggactaccatactctagttgtccatgatggctgagaataacatgacgcaaaacaacgacatcctcacgcgtatcgtcaatattgagctccataagcaccttagtgatttcttcatcaatcaaagcaatatgaccaatcaagtttccacgaaccgtatactcagtattttcaggaccagtaagttcaataaccttagctaaatcatgaagcataattccggcaaagagtagactcttattgagctctggataaatatctccaatgctgtccgctaagcgaaccatagtagctgtatgataggctagtccactttcaaaggcatgatgatttgttttagcagctggaaaagtgaaaaactccttattatactttcgataaagggcacgaacaacacgctgccaagttgcttcctcaatcttgaaaatcatttgctctaggtattcgcgtacttcggaaggatttactggtggtttctctttgaaatcagctggatcatttggctcaccaaatgtaggcaagcgtaaggtaatttggtttacctgaggagtattattataaacctctcgacgtccctccatatgcactactttacctgcggtaaattcttcgacattataaggttgagcatcccataggttgcctgaaatctctccagtatcatcctggaatgtaaaggcaatgtaatcctttcctgctcttgtcttacgtacctctgcacgcttaatcagataaaaaccttcaaaatactcgtcttttttcatttgattaatcttcatgcttgtcctcgttttctaatcgtggtaaatccaacaaactttgtgtcgcactgtcttgataggtttcaattgtatcaagagctctaacaattgccctactccttgtgttgagaagactatcgacggttttacttgctgtattcaattgtttctgagctttagctaacatatctccaaacctgctaaattctagtttgacgttacctaaaatcttactaatatcatccgcattcttttgaatattcaaagttctaaatcctacagacaatgaattcaagagtgctgataaggttgacggccctgcgataacaatattctcttcgcgacgaagggcgtcaaagaaggctggttggcgtactacctcagcataaagtccttccgtcggcaaaaataatatgccaaaatttgtagtttcaggtgggttaagatacttcttgttaatatcctttgcaaatcgcttaatactagtcagaagtgacttacggtgattctcaatctcctctttattaccagactcataagcatcttccagacgatagtaatcttccaaaggaaacttagaatcaatgggaaggtagatatattcatctttatggtttcctggcattttgattgcatattcaactcgttcacttgaacctgataccgtaggaaattctcgctcgtactgattaacagtcaatatgtcttcaataatttgccctaattgaagctctcccaaaatacctcgtgtttttgtatttgaaaggaccttgttaagacttccaacatccttggctacatttttcatttcccccaagccctggttaaccgactctaattgtcttgaaaccgtctcaaaagaggcttgtaaacgtgtttgtaaggtttgctcaagtttctcttcaactgtctgacgcatttgttccaaacgtttctcattggaatcctgcatatctttaacagctttggttaagctttggtttatttgctcaaggcgttggtcggaacggtctcgattatcagacaaattttgatgtaaaacctctcggatatctgtcaactgttgatatagttccatctgcaattggttcaattgctttgtcgtttccagttgatttgtcttagcaaaagattccaattgaaacgaaacttgatctgaaagattatctgcattttcttccaaactcttattaatctgttcttttaactccatattcttcaagaaaagagcaataagaatccccaagcttaataaagttaaaagtgtaagtagatagatcatactaactcctatctttagtctgaatgacaatcacatatccatttggcacaagcacttgaatcggactatcaacgaattcattactagaatagactttcttttggaaataatttacactagttaattcgtattttgctcccaaaatcgtcagttctccatctccttcatgtaaaaaagaaacatatgtcattccgggttctggtaaaactttatgacttccttctggataataagtaatcttattttgcttatctcgcaaacagatacgcctcataaaaggagctaattcaggatcgctgaccaaaaatatatttgataacatatgatcaattctgccaccaaaagcaccaaaaatagttacttccgcctcaggatatagctgaaatataatttttagggctaactctgtatccgtatcatccttttcagctggagcaatcatacaatctttggcagctgattgaatcatctctaactctgaccgagatactgaatcaaagtctccgacagccaaatcaagaggtaaacctaactccaacaaacgtaagcacgcacgatccaccccaacaaaataatcaaaatcggtagcgaaccactctagctcaccaccgacaaataaagctattttaggcatcgatagcatcacgaagcgtttgaacttgcgctgtcaaatcaggatttttgaagaggtaagagcccgctacaaaaacattagcccccgccttggcacatgctgcaatagtgttgttatctacaccaccatcaacttcaatatcgaatgaatagccacctttttcacgaagctccacaacacgctctactttagacatcatttctggaatgaacgcctgaccaccaaaacctggatttacagtcatgataagtacttgatccactaaatcaagtacaggaataagtgcctcaactggggttccaggattaatcacaacacctgctttcataccagcagctttgattttctggagagcaccatggatatgcttagtggcttcaacatgaatggtcatgatatctgcaccagcttgtgcataggcatccacataacgctcaggatcaacaaccataaggtgacaatcaaaaactaacttgctatatttacgcatgctagcaaccacatctgctccccaactgatattaggaacaaattgaccatccataatatcaatgtgaacatattccgcacctgatgcatcaatacgagctagttctgaagcaaaattagcgtaatcagcagctaggatagaaggagcaattttatatgacatgagatacctactttctttttacagtttttttatatgtttcacgacgattttcaatttcacttaaaaattgaaggtaattatcataacggacttgccagatttggccatcttcaacctcttccttaacagcgcaagaaggctcatgggtatgagtacaagaacggaatttacagccatgactagcttgacggatttccggaaaagcttcactcaagtcctctgcattatccacttcataatctagcgatgagaatcctggtgtgtcagcaatcttcccaccatgaacgtcataaagacttacagcccttgtagtatgacgtccacgacctagactgtctgaaatctcacctgtttctaaatgtaactgcggggcaatacggttcaacaaggttgattttccaacacctgtctgtcccataaagactgttattttatcagtcaagagcggcaatagttcttccaaactgaagacaaaatcaaaaccaattttttgatactgtttttgaatggccttcatttctgaatcatcttcaaccaaatccatcttagaaatatagattacaggctttatatttttatgctctagtaaaaccaaaaaacggtccaaaagattactattaaaatccggttccttagcagacataataaccacagcctgatctatattgacaatgggtggacgcactaaactattgattcgttgaccaattttaaggatataaccttctgaattttcctctgctgaaaattcaacaaaatccccaacataaggtgtttgtcctttttttctaaaatttcctcgtgcacgcgtctggtatacaacaccatcatgctctacataatagaaacctgccaatgctttgataattcttccttgcaagtgaactcctcattcgtttaatagccctattatatcacaaattagaaagcttttctggaacaaaaaaactgatcttccatttcccatggacctccttgcattttcaatagattgcagtataataggcatatcatctgcggaggtggtggaatggcagacacgcatgcttcaggcgcatgtgctttttcaagcgtgagggttcaaatccctttctccgcatagctaaaaatcccactgaatctcagtgggatttttgaattataggcctgcttctctcaaagcatctgataagtgtgcaaaatcagaaatagataaagcctctccacgaatagaaggttttatatctgcaatttccaaagccttctcaagtttggattttacttcttcagatttaccaaaatgatttgttaaattattccacaatgtcttacgacgatggacaaagctagccttagccactcggaaaaggaaatcctcatctttaacttcaaccaacggttgttcacgacgcgtcatcttcaaaatggctgagtcaacattaggggctggtacaaagactgtacgagggacaatgaatgccactttagcagtcatataatactgaacggcaattgatagagaaccataagccttgctattaggctctgcagaaatgcggtcagcgacttctttttgcatcataacgacaaattctgcaaaaggaatcttactctcaatcaaatgcatcaagattggcgtcgtaatataatatggcaaattggctacgaccttaattggtagttctggatttttaaattcttttacccgtgtctgtaaatctgccttgagaacatcttcattaatcacgttaacattatcatgatcacgtaatgtatcctccaaaatcggaaccaatcgatcatcaatttcaaaagccataacttccgcagcattttcagccaagaattctgttaatgctccgataccaggtccaatttcaatcacattgacatttttatcaatctctgccgtatcaactattttttgtaaaatatttgtatctgttaagaagttctgtccgaaagacttcttaaaggtaaagccatggcgctcaaggacagccttggtcacgctataatctgcaattctcatttattctcttttcttattaatttcacgatttttatatttggacacaaaacaagtccaaattcttaattatcccaacctctataataaactacttaatagcgatttgattttaagattactggtagtctaataatttgacatagcctcttctagctcctctagagtaattccaaacaattccaaacgttttagaagctgctttccattgcaataaccaatacgaagcgcctcgcccaaatattctcgacgctttcgactatctgctcccattagtagtcctaacttcataagatttgatttactaatatcaaactgattatcatcatcgtaactacctagaactccagataaggccttttgaagatcctcaaaactcgcatgctcaacacccaatgaacgacctttagtcttagattttggtgttgcttccccacggtttaaaaaagcatgctttgctgtcggaacagcttccatgatgattttacggatacgttcaccattatagtctggatcagtaaaaacaatcactccgcgtaagtcattaagcttatcaatacgctctaagtcgtcttcattgatagcagagcctctagtctcataggtatccacctcataaaaacgtctcaaatttgccgtatcatccttaccttctaccacgatgacttcttgaatttttattttattcatccagcccaaaaatcctcatcgcattatcataggtagccctagcaacctctgcacttgttaaaccacgaagctcagcaatcttatctactacgtaacgcgtatagcctgtacgattctcgcgaccacgtttgggaacgggtgccaaatacggtgcatccgtttcaaccagaatcttatctaaaggtaacttctgagcagcttcttggacatccaaagccttcttaaaagttacaacacctgaaaacgaaatcatcattccaagatcaacaaatttttgagccatttctagggatcctgagtatgagtgcataatccccccacgaggaccgacaccaacttctttaataatagcgtaagtatcctcaagtgcatcacgtgtatggacaacaaaaggtaaattgtgttcctttgacaaagctatttgacgcttaaagacatcaatctgaatctctttaggatcttccatccaataataatccaaaccaatttccccaagtgccactactttcggattatccaattgtgatacaatcatatcctcaatttcctgagaataggaccctgcttccgtaggatgccatccaatcgtactatatagttgatcatacttctctgatagtgctaaagatttatcaattgttggcttatcaaaaccaacaatattcatttttataacacctagttcagctgcaaaatctatttcttcttgttcttttcctgcaaaattatccacattaaggtgggtatgcgtatcaaaaatttcaatcataggtctattataacaaaaacgagcgagcatagctcactcaccttttcattttattaaacaaagagtcgcatatattctatctttgtacaacgattcattacaatatcctgtctattcgcttgacgaagaatagtctcagcctcctcattctcaagaccaatttgactccaaaaaacttttgcatccgtctcaagaaaatcataagcaacatctggtaaaaactcacttcgtctaaatatatcaacaatatcaatcgaaaatgggatatctttaagataagcataaacatgctctcctagaagctcctgaccttctagtttgggatttactggtatgatacgataaccagcagcttgtagaaaatgagcaacctgataagatgctgcctccttacgatgagataaaccaacaattgcaatcgtctttgctgattttaaataagattctataacctcagcactaggattttgaaatgaataagacatatgactctcctcgtcgttcgaataaactaaaaataaaaatccctaaacgggactgtgacaattagttagctaagctctgcaacgatagctttaatttgttcttttgtatgtacacctgcaacttgcttaacaacctcaccatcttttttgaagagtaaagttggaatagacatgattccaaacttctgagctgtttctgggttctcatcaacatcaattttaacaatcttaagttcatcttctgaaatttcttcagaaagttgctcaagaattggtgcttgcatcaagcaaggcccacaccaagttgcccaaaagtcaatcaaaacgagtccttcagctgtttcttgttcaaatgtagcatctgttactacttgtgtcatatattcatcctcctagacattataaaacttttgtagacttattctatatgattctaaaggccattgcaagaatttgacacatacataaaaaattcttatcaaatattagtcattgcctatcatagacatcacttgctcacagcctatcttgggagtataataataaaaaactataaaaatagaaatgagtaaatatggataaagatgcaatgattacctatctcataggtgaactcaaaaaagaaaatctagaattacatgatttgattatcccagaagaactcgaggaaaagcaaaagcttctcagagcgctttttaatacacgtaaaccaatggcagcatcaacacaatttctgacaatacaagacctttacctacaagttaggaaaggggaacgtggatttgtacaactcagttcactccagcccatccctcaagatgatcgaatctacctctggaagggtgatattacaagactcgaagtagacgcaatcgtaaatgcagctaataaaaccttactaggatgtatgaaaccacttcatgattgtgtagataatgctattcatacatatgcaggtgttcagttacgccaagcttgtttcgaactcatcttagaacaaggatacgaagaacccgttggcatggctaaaatcaccccagcttacaatcttccttctgcctttgtcattcatactgtaggtccgaaaatagtagaccaaccaacacaaattgatgaagatcttttagcaaaaagttatctttcagtattagcactagctgagaaaaataacattgaatcaattgctattccatgtctatcaactggggatttcaattttccaaaacaaaaagctgccaaaatcgccattcaaacagtcaaaacctttattgatgagtcaagtataataaaaaaagttatatttaacgtatttgatgatgaaaatttagcaatttatcaaaaactgcttgctgaatcataaccacccgtctaacgggtggtttgatcatgggctataagcccataataccagccagcgcctaaagacgctggctttcactttgttcaagccttattgcttttgactcgtcacaagcctctcaaagaggcattcgcattacttaccattatccctgaagggattttcatattcttttacgcttaatttgtccaaagcgatatcatgcttctcttgttcctgaatatatttcttaattgtggcttcattaagtcctaccgtacttacataataaccttctgcccaaaaatgtctgttaccaaatttatattttaaattggcgtgtttatcaaacatcatcaatgcacttttaccttttaaatatcccataaaactagctacactcattcgtggtggaatactcactagcatatgaacatgatctggcattaagtgaccttctattatttcaacgcctttatattggcatagtctatgaaaaatctctcccagactactcctatattgattatagattatttttcgtctatacttaggtgtaaatacaatgtggtacttacacatccattttgtatgtgataaactgtgagctttttgcgccatagtcttaactcctttcgttttacaattggcttgaacacctatattgtaactcgtttggagtttttttgttatgacggtataaccttcgatgcgcacccgcatagcgggtggtttatttgtttcgcacctttggagcgaaacggacttaaagtcacataaaataaataaaaaagaagaaaatcattttgattttcttctttttttattgcataactgactgctcttttaaaagattaaaaaatgagggataatctcttttaagattaacaaaaccaccatccttagataagaaactatgttcggaaacagctgtacaaacagaaacaccattctgatttaccatatggtatacaaaagaaagtttagcagatttaacacttttaacattaatctcaatagaaatctcatctgcaaaagtagaaatagctttatagtcacaggaaattgaagtaacaggagagataattccctcctcttcaattttttcataaggccaacctatctctcttagaaaaaaagttctagcctcttccatccatcgtacataattggaatgatgagtaatacccattcgatctgtttcataatactggacctcgtgtttacaaataaacataagaacctccaaaaagattaagaaataaaatctaaaatgtcatcctcagaaagagaagagtcacaaacaaccttagcagttccattttctgaaacaaagagggctggaacagtagcaataccatatcttttacgtaaagcttgaatatcttcaagttcttcactattttcactattaatatagaaaatagtaagatttgaattacgtgcaacattagataatttaggttcaaaaagttgacaatatggacaagaaggacggccaataaataaaataaacttatccgtagaagaaattttatctttagcagtagtaacagaaataggtgtaaacgctgatgcaaaattcgacataataatacctctcaaataaaatataatcatatcatatctgaaatttagagttttaacaagtaaataacttaacaaaaaaagctagacctacgtccagcaataaaacctatactccgccagtaggactcgaacctacgacatcatgattaacagtcatgcgctactaccaactgagctatggcggataaacgctaagcgactaccgtatctaacagggggcaacccccaactacatcaggcgtactagggcttaacttctgtgttcggcatgggaacaggtgtatctcctaggctatcgtcacttaactctgagtattctcaactcaaaattgaatatctatactgtatcaagaaaccaaatcgttgtcaatatgtctcagttactttctttggataagtcctcgagctattagtattagtccgctacatgtgtcaccacacttccacttctaacctatcaacctgatcatctctcagggctcttactgatataaaatcatgggaaatctcatcttgaggtgggcttcacacttagatgctttcagcgtttatcccttccctacatagctacccagcgatgctcttggcagaacaactggtacaccagcggtaagtccactctggtcctctcgtactaggagcagatcctctcaaatttcctacgcccgcgacggatagggaccgaactgtctcacgacgttctgaacccagctcgcgtgccgctttaatgggcgaacagcccaacccttgggaccgactacagccccaggatgcgacgagccgacatcgaggtgccaaacctccccgtcgatgtgaactcttgggggagataagcctgttatccccagggtagcttttatccgttgagcgatggcccttccatgcggaaccaccggatcactaagcccgactttcgtccctgctcgagttgtagctctcgcagtcaagctcccttatacctttacactctgcgaatgatttccaaccattctgagggaacctttgggcgcctccgttaccttttaggaggcgaccgccccagtcaaactgcccgtcagacactgtctccgatagggataacctatctgggttagagtagccataacacaagggtagtatcccaacaacgcctcactcgaaactggcgtcccgaggtcataggctcctacctatcctgtacatgtggtacagatactcaatatcaaactgcagtaaagctccatggggtctttccgtcctgtcgcgggtaacctgcatcttcacaggtactaaaatttcaccgagtctctcgttgagacagtgcccaaatcattacgcctttcgtgcgggtcggaacttacccgacaaggaatttcgctaccttaggaccgttatagttacggccgccgtttactggggcttcaattcataccttcgctattgctaagcactcctcttaaccttccagcaccgggcaggcgtcaccccctatacatcatcttacgatttagcagagagctgtgtttttgataaacagttgcttgggcctattcactgcggctgaccataagtcagcgccccttctcccgaagttacggggccattttgccgagttccttaacgagagttctctcgctcacctgaggctactcgcctcgactacctgtgtcggtttgcggtacgggtagagtataattaacgctagaagcttttctcggcagtgtgacatcactaacttcgctactaaacttcgctccccatcacagctcaatgttatagatataagcatttgactcatatcacacctcactgcttggccagacacttccaatcgtctggtttagttagcctactgcgtccctccatcactatatactctagtacaggaatatcaacctgttgtccatcggatacacctttcggtctctccttaggtcccgactaacccagggcggacgagccttcccctggaaaccttagtcttacggtggacaggattctcacctgtctttcgctactcataccggcattctcacttctatgcgctccagcactcctcacggtacaccttcttcgcacatagaacgctctcctaccatacctataaaggtatccacagcttcggtaatatgttttagccccggtacattttcggcgcagggtcactcgactagtgagctattacgcactctttgaatgaatagctgcttctaagctaacatcctagttgtctgtgcaaccccacatccttttccacttaacatatattttgggaccttagctggtggtctgggctgtttccctttcgactacggatcttagcactcgcagtctgactgccgattatatctcgttggcattcggagtttatctgagattggtaatccgggatggacccctcacccaaacagtgctctacctccaagagacttaacatcgacgctagccctaaagctatttcggagagaaccagctatctccaagttcgtttggaatttctccgctacccacaagtcatccaagcacttttcaacgtgccctggttcggtcctccagtgagttttacctcaccttcaacctgctcatgggtaggtcacatggtttcgggtctacgacatgatactaatgcgccctattaagactcggtttccctacggctccgtctcttcaacttaacctcgcatcatatcgtaactcgccggttcattctacaaaaggcacgctctcacccattaacgggctcgaacttgttgtaggcacacggtttcaggttctatttcactcccctcccggggtgcttttcacctttccctcacggtactggttcactatcggtcactagagagtatttagggttgggagatggtcctcccagattccgacgagatttctcgtgtctcgccgtactcaggatactgctaggtataaagactatttcgaatacgaggctattactctctttggcctaccttcccaggtagttcttctataatctttaagtccacgttgcagtcctacaaccccgaagagtaaactcttcggtttgccctcttgccgtttcgctcgccgctactaaggcaatcgcttttgctttctcttcctgcagctacttagatgtttcagttcactgcgtcttcctctacattaccttaacagtaatgagtgacaggcattacctgccgggttcccccattcggacatctctggatcattgctcacttacagctccccaaagcatttcgtcgttagtcacgtccttcatcggcttctagtgccaaggcatccaccgtgcgcccttattaacttaaccttattttggtctttcgacctaactcattaaatattcacagcgtttcggtttattttcttgttactatctatatgtatttaattacatatggaatttgatatagatattcaattttcaatggacaatacttgaatctttcgattcaatggagcctagcgggatcgaaccgctgacctcctgcgtgcaaagcaggcgctctcccagctgagctaaggccccacaagacctctcaaaactaaataagaaactcaagtacattccgtttttccttagaaaggaggtgatccagccgcaccttccgatacggctaccttgttacgacttcaccccaatcatctatcccaccttaggcggctggctccaaaaggttacctcaccgacttcgggtgttacaaactctcgtggtgtgacgggcggtgtgtacaaggcccgggaacgtattcaccgcggcgtgctgatccgcgattactagcgattccgacttcatgtaggcgagttgcagcctacaatccgaactgagattggctttaagagattagcttgccgtcaccgactcgcaactcgttgtaccaaccattgtagcacgtgtgtagcccaggtcataaggggcatgatgatttgacgtcatccccaccttcctccggtttattaccggcagtctcgctagagtgcccaactgaatgatggcaactaacaataggggttgcgctcgttgcgggacttaacccaacatctcacgacacgagctgacgacaaccatgcaccacctgtcaccgatgtaccgaagtaactttctatctctagaaatagcatcgggatgtcaagacctggtaaggttcttcgcgttgcttcgaattaaaccacatgctccaccgcttgtgcgggcccccgtcaattcctttgagtttcaaccttgcggtcgtactccccaggcggagtgcttaatgcgttagctgcggcactgaatcccggaaaggatccaacacctagcactcatcgtttacggcgtggactaccagggtatctaatcctgttcgctccccacgctttcgagcctcagcgtcagttacagaccagagagccgctttcgccaccggtgttcctccatatatctacgcatttcaccgctacacatggaattccactctccccttctgcactcaagtttgacagtttccaaagcgaactatggttgagccacagcctttaacttcagacttatcaaaccgcctgcgctcgctttacgcccaataaatccggacaacgctcgggacctacgtattaccgcggctgctggcacgtagttagccgtccctttctggtaagctaccgtcacagtgtgaactttccactctcacactcgttcttgacttacaacagagctttacgatccgaaaaccttcttcactcacgcggcgttgctcggtcagggttgcccccattgccgaagattccctactgctgcctcccgtaggagtctgggccgtgtctcagtcccagtgtggccgatcaccctctcaggtcggctatgtatcgtcgcctaggtgagccgttacctcacctactagctaatacaacgcaggtccatcttgtagtggagcaattgcccctttcaaataaatgacatgtgtcatccattgttatgcggtattagctatcgtttccaatagttatcccccgctacaaggcaggttacctacgcgttactcacccgttcgcaactcatccaagaagagcaagctcctctcttcagcgttctacttgcatgtattaggcacgccgccagcgttcgtcctgagccaggatcaaactctcattaaaaaatttaataattgttcgagcgttaactcattaccgtcgtctgacgatttattcttgtaaattgacaggttataattcttctatcataaccctgcacttggtttcttattcagttctcaaaggtctaaatcgggaagacaggattcgaacctgcgaccccttggtcccaaaccaagtgctctaccaagctgagctacttcccgataaaaatgcaccctagaggagtcgaacctctaaccgcctgattcgtagtcaggtactctatccagttgagctaagggtgctcattattatattatgccgaggaccgggatcgaaccggtacgaaagtttcctttcgcaggattttaagtcctgtgcgtctgccagttccgccaccccggctcctcaagcgaacgacgggattcgaacccgcgacccccaccttggcaaggtggtgttctaccactgaactacgttcgcattttatgccggctacatgacttgaacacgcgaccctctgattacaaatcagatgctctaccaactgagctaagccggctaacttttctaatgcgggtgaagggacttgaacccccacgccgttaagcgccagatcctaaatctggtgcgtctgccaattccgccacacccgcatatatgacccgtactgggctcgaaccagtgacccattgattaaaagtcaattgctctaccaactgagctaacgagtctcaaatatttctacttgacggtcccgacgggaatcgaacccgcgatcttcgccgtgacagggcgacgtgataaccgctacaccacgggacctatgggagttaacgggatcgaaccgctgaccctctgcttgtaaggcagatgctctcccagctgagctaaactccctatgcgctaagcgactaccgtatctaacagggggcaacccccaactacatcaggcgtactagggcttaacttctgtgttcggcatgggaacaggtgtatctcctaggctatcgtcacttaactctgagtattctcaactcaaaattgaatatctatactgtatcaagaaaccaaatcgttgtcaatatgtctcagttactttctttggataagtcctcgagctattagtattagtccgctacatgtgtcaccacacttccacttctaacctatcaacctgatcatctctcagggctcttactgatataaaatcatgggaaatctcatcttgaggtgggcttcacacttagatgctttcagcgtttatcccttccctacatagctacccagcgatgctcttggcagaacaactggtacaccagcggtaagtccactctggtcctctcgtactaggagcagatcctctcaaatttcctacgcccgcgacggatagggaccgaactgtctcacgacgttctgaacccagctcgcgtgccgctttaatgggcgaacagcccaacccttgggaccgactacagccccaggatgcgacgagccgacatcgaggtgccaaacctccccgtcgatgtgaactcttgggggagataagcctgttatccccagggtagcttttatccgttgagcgatggcccttccatgcggaaccaccggatcactaagcccgactttcgtccctgctcgagttgtagctctcgcagtcaagctcccttatacctttacactctgcgaatgatttccaaccattctgagggaacctttgggcgcctccgttaccttttaggaggcgaccgccccagtcaaactgcccgtcagacactgtctccgatagggataacctatctgggttagagtagccataacacaagggtagtatcccaacaacgcctcactcgaaactggcgtcccgaggtcataggctcctacctatcctgtacatgtggtacagatactcaatatcaaactgcagtaaagctccatggggtctttccgtcctgtcgcgggtaacctgcatcttcacaggtactaaaatttcaccgagtctctcgttgagacagtgcccaaatcattacgcctttcgtgcgggtcggaacttacccgacaaggaatttcgctaccttaggaccgttatagttacggccgccgtttactggggcttcaattcataccttcgctattgctaagcactcctcttaaccttccagcaccgggcaggcgtcaccccctatacatcatcttacgatttagcagagagctgtgtttttgataaacagttgcttgggcctattcactgcggctgaccataagtcagcgccccttctcccgaagttacggggccattttgccgagttccttaacgagagttctctcgctcacctgaggctactcgcctcgactacctgtgtcggtttgcggtacgggtagagtataattaacgctagaagcttttctcggcagtgtgacatcactaacttcgctactaaacttcgctccccatcacagctcaatgttatagatataagcatttgactcatatcacacctcactgcttggccagacacttccaatcgtctggtttagttagcctactgcgtccctccatcactatatactctagtacaggaatatcaacctgttgtccatcggatacacctttcggtctctccttaggtcccgactaacccagggcggacgagccttcccctggaaaccttagtcttacggtggacaggattctcacctgtctttcgctactcataccggcattctcacttctatgcgctccagcactcctcacggtacaccttcttcgcacatagaacgctctcctaccatacctataaaggtatccacagcttcggtaatatgttttagccccggtacattttcggcgcagggtcactcgactagtgagctattacgcactctttgaatgaatagctgcttctaagctaacatcctagttgtctgtgcaaccccacatccttttccacttaacatatattttgggaccttagctggtggtctgggctgtttccctttcgactacggatcttagcactcgcagtctgactgccgattatatctcgttggcattcggagtttatctgagattggtaatccgggatggacccctcacccaaacagtgctctacctccaagagacttaacatcgacgctagccctaaagctatttcggagagaaccagctatctccaagttcgtttggaatttctccgctacccacaagtcatccaagcacttttcaacgtgccctggttcggtcctccagtgagttttacctcaccttcaacctgctcatgggtaggtcacatggtttcgggtctacgacatgatactaatgcgccctattaagactcggtttccctacggctccgtctcttcaacttaacctcgcatcatatcgtaactcgccggttcattctacaaaaggcacgctctcacccattaacgggctcgaacttgttgtaggcacacggtttcaggttctatttcactcccctcccggggtgcttttcacctttccctcacggtactggttcactatcggtcactagagagtatttagggttgggagatggtcctcccagattccgacgagatttctcgtgtctcgccgtactcaggatactgctaggtataaagactatttcgaatacgaggctattactctctttggcctaccttcccaggtagttcttctataatctttaagtccacgttgcagtcctacaaccccgaagagtaaactcttcggtttgccctcttgccgtttcgctcgccgctactaaggcaatcgcttttgctttctcttcctgcagctacttagatgtttcagttcactgcgtcttcctctacattaccttaacagtaatgagtgacaggcattacctgccgggttcccccattcggacatctctggatcattgctcacttacagctccccaaagcatttcgtcgttagtcacgtccttcatcggcttctagtgccaaggcatccaccgtgcgcccttattaacttaaccttattttggtctttcgacctaactcattaaatattcacagcgtttcggtttattttcttgttactatctatatgtatttaattacatatggaatttgatatagatattcaattttcaatggacaatacttgaatctttcgattcaatggagcctagcgggatcgaaccgctgacctcctgcgtgcaaagcaggcgctctcccagctgagctaaggccccacaagacctctcaaaactaaataagaaactcaagtacattccgtttttccttagaaaggaggtgatccagccgcaccttccgatacggctaccttgttacgacttcaccccaatcatctatcccaccttaggcggctggctccaaaaggttacctcaccgacttcgggtgttacaaactctcgtggtgtgacgggcggtgtgtacaaggcccgggaacgtattcaccgcggcgtgctgatccgcgattactagcgattccgacttcatgtaggcgagttgcagcctacaatccgaactgagattggctttaagagattagcttgccgtcaccgactcgcaactcgttgtaccaaccattgtagcacgtgtgtagcccaggtcataaggggcatgatgatttgacgtcatccccaccttcctccggtttattaccggcagtctcgctagagtgcccaactgaatgatggcaactaacaataggggttgcgctcgttgcgggacttaacccaacatctcacgacacgagctgacgacaaccatgcaccacctgtcaccgatgtaccgaagtaactttctatctctagaaatagcatcgggatgtcaagacctggtaaggttcttcgcgttgcttcgaattaaaccacatgctccaccgcttgtgcgggcccccgtcaattcctttgagtttcaaccttgcggtcgtactccccaggcggagtgcttaatgcgttagctgcggcactgaatcccggaaaggatccaacacctagcactcatcgtttacggcgtggactaccagggtatctaatcctgttcgctccccacgctttcgagcctcagcgtcagttacagaccagagagccgctttcgccaccggtgttcctccatatatctacgcatttcaccgctacacatggaattccactctccccttctgcactcaagtttgacagtttccaaagcgaactatggttgagccacagcctttaacttcagacttatcaaaccgcctgcgctcgctttacgcccaataaatccggacaacgctcgggacctacgtattaccgcggctgctggcacgtagttagccgtccctttctggtaagctaccgtcacagtgtgaactttccactctcacactcgttcttgacttacaacagagctttacgatccgaaaaccttcttcactcacgcggcgttgctcggtcagggttgcccccattgccgaagattccctactgctgcctcccgtaggagtctgggccgtgtctcagtcccagtgtggccgatcaccctctcaggtcggctatgtatcgtcgcctaggtgagccgttacctcacctactagctaatacaacgcaggtccatcttgtagtggagcaattgcccctttcaaataaatgacatgtgtcatccattgttatgcggtattagctatcgtttccaatagttatcccccgctacaaggcaggttacctacgcgttactcacccgttcgcaactcatccaagaagagcaagctcctctcttcagcgttctacttgcatgtattaggcacgccgccagcgttcgtcctgagccaggatcaaactctcattaaaaaatttaataattgttcgagcgttaactcattaccgtcgtctgacgatttattcttgtaaattgacaggttataattcttctatcataaccctgcacttggtttcttattcagttctcaaaggtctttgtctctcttaagacaacttctatattctagcaaatctagaatgtcttgtcaacacttttttgaagtttttttcacttctcgtgtccgctgtctctcccgaaacagcttatttataatatcatctctggcctgtcttgtcaataacttttttaaagttttggaaccttttcaagtttgtggcaagtcagttaagacaacttttatatcttatcacccaaataaattcttgtcaataggtttttttgaaaaaaataaagcagtacaatcatgtactgctaaataaattatttaaaaatttcttttacttgacttgtaaccatacttttctataaagtcttggcgaaactcaagtaaattgtcatctacaatagcttgtcggaccttgaccattaaatttaccaagaagtagagattatgataacttgtcaggcgaattccaaacgtttcatctgctttcaacaaatgtctcacataagcacgtgtgtaattcttacatgtataacaatcacattcaggatctatagggctaaaatcttctgcatacgctgcatttttaaccacgagacgcccttgactcgtcatacaagttccgttacgagcaattcgtgttgggagaacacaatcatacatgtcaacgccacgaataacaccgtcgatcaaactatctggtgcccctacccccataagataacgtggtttattctcaggaagtaaaggtacagtaaagtctagaactgcattcatctcttcatgagtttctcctactgcaagacctccaattgaataacctggaaaatccatggaaaccaaatcctgtgcagattgtctacgaagatcttcaaaacctgctccctgtacgattccaaaaagaccttggtcatgtggacgacgatgtgcttttagccctcgttctgcccaacgacttgtacgttcaatagaatttttcacataatcgtatggttggtaaaattgagggcattcatcaaaactcatcataatatctgagccaagattattctgaatcgagattgctttttcaggagataaaaacatcttacttccattgaggtgatttttaaatgtcacaccttcttccgagatgtttcgtttttcggctaatgaatatacttggaaaccaccgctatctgtaagaatcgcttggtcccaattcatgaatttatggagtcctccagctttagcaacaagctcgtcaccaggtcttagccataaatgataggtattggccaaaataatccctgaacccatctgttttaattcttcaggagattgcgtttttactgtagcttgggtgcctacaggcataaacatcggcgttggaaaagttccatgaggcgtgataatttcccctaggcgtgctcctgtgtgtttttctttctttataagacgatatttaataggaaaatcagtcatttatactccttacattaggaaaaacagtcctaagtattttttagtaagtggtcattatccacaaccgctttagtttatcaaaaattacaagaattgtcagctctatattttcaaacttttggatgaataacatcaaacatcaacactatcatttatagcaaaaaacaaaaagcaacagtctcgagcactgttgctttcaataatgtcttaagctgaaagaactttacgtcctttacgacgacgagctgcaagaacacgacgtccgtttttagttgacatacggtgacggaatccgtgtttacgttgacgacggattttacttggttgataagtacgtttcacgttgaatacctcctgatagattttcgtattcgtttagccggctatttttgatcagttactaaacataccatactattttacagcaatagcttaatcttgtcaagaattacttagatattaatttcattatatcttcgatgcccgaaggctagtgataactgtaaactacaatgccgttcctatatcatcgcttgctcataaccttcttgctagtttagctattttcttgagtacctcttttcgcttataatcactcatatactcaacgggtgaaacctgggtaactttgaccgatttaataccacaaggttttaggacttgaaattttaggactttgctataatcttgaactaaaggtagaacaatctttggtgtattgtgggttgtaataatccaagctttcccagtcaatttaccatccaatccacggggtgtattttcataggcaaagccagcaacaaaaacgcgttcaataaatcctttcaagatagctggcattccactccaccaagttggaaaaataaaaatcaactgatctgcccaagttattaaatctcgatagtctttcatagctacatcgtgcgctaagtctcttctcctatgtgttgtatcaaaacgtaaaacaggatcgaacttctctttatacaaatctagaatctttaactcatgtttagacgataaattttctttaacagtctctagtatagaggcattgtagctcttgtcgtttggatgggagtagataattaaggttttcattgtttagctcctttaacatagatgtctaacatagtactaacagtctcttcaatagtgttattattgaaattatcaccaataggactccttaccaaaacggctaatccagtaataaaactccagatatgaactaatatttctgcctcactaccagaaatattcatgttacttttcagcttcagaaccacactcttaaagtgctcaaaccctggtaaatgggcattaacagagatactgtcccgagtgagctccatataattgaaaggaaacttaataaacaaggcctcaaaactatttgtttctttttgagcaaatcccacaaaattacagcccattaatactaattgacctcttacatcaagcgaagagtctaccccttgtgtcagacacttcaaaaagatctcagataaacgctctaaaactacctgaagatagacatccttattttcaaagtgcttatagggcgctccatgggtgaccccacatctttgagccaccgttcggatagatagttgatcaacacctcttgttcttatttccttgactcctgtttcgattaacttttccttcaattcagcagtattacgtttcattttgactcctattcccatctaagtagacagcgactaccttttaaataaagtatacactgtctactttttattgtcaaaaaaaccagccttcaaataagactagcttctgtaagcaataaacgctattttaactatacttttgtcacaacaacgtaacgattaggatcgtccccttctgagtgactttcaacacctccaatttgagaaagtgccttatggataatttttcgttcgctattcgtcattggatccataacgtactctcgacctgtttcttttactttagtcgccgttttttctgctagatcaatcaaagtctctgtgcgttgctccaaataatcacgaacattaagaacaacactaaaacgtttagaatgacgatcgtgcaaataattttgcgctaaaagttgtaaagacttgagaaccttgccatgataaccaataacacgaccaggttggtctgtttcaatctgaatgataatattgcgacgattgtgactaacctctaggctagcatcgacatccatttcatagataattttttcgaggtaagataaaacatcatctgcagccccttgaatatcttctaaattattttcagaagactcatctgaactaaactcagatgccacaaatgaactgaaatctccttcagaagtttccggagtctgaacttgagccaccggttctagttggggctcaagcgaatttgccataaattctgtagcatcctcttccgatgactcacgtttaacagatagaggaataattgttgcctttggttgctcctgtttcttatctggcaactcttcaccaagggtctctgtagacactggttgctttaagttttcttgtgcaatttccttactatctgaaaccgtaacgagttttgtcactttattgaaagcaatcgtttcgtcttttggacttgcgacagaatcgtctaattgttttacagcatcgggagacactttaacggtgttttgatctgcttcgtgagctatcttttcatttattggttcaacactaactcgagctggtttctttccgaaccctagaaaaccttttttctcacgagaaatcaccttaatatgagccttcatacggggtaaattaagatctttcaaacctttttcgatagcttgttcgactgttcgtccagaatagacaaccataataagcctccttatttacgtttatgcgcctttttcttggcacgacgaatcttagctttacgttctttttcttccgcttccaaacgattacgttcttcaatgattttaaacggattattaaaaaccaaaatctgaacaacttggaaggcgttcgaaactgcccagtaaagtgctacccctgaagaaatctgagttccaaaccagaaaataaagattggaagcatgatattcataacaagaagcattgcactacgatctttagctgccttatttgtcaaccaagttgaaaggaaggtgaaagcagccgccaaaatcggaagaataaagtaaggatctttctgacctaggtcaacccagaggaatgttccttctcgcaactctggcactcgcgtgagcgctccataaagagccatcaaaataggaaattggatcaagagaggaacgaagcttgcgtaaggatttacaccatgctctttataaagatcttgttgtgcataagcaagagcttcacgattctcgcgtccaggatactcactctgcaagcgacgtaactctggctgcaactcttgtagttcacggcttgacttaatttggcgattataaagaggaatcattaccgcacgaattaaaatcgtgaaaataataatacctaatccaatagaaccaccaaatgagagcccttgaatagccttcccaaacattaaaataagacgttcccaaaggcctgtggagtgacttgtaacatcacttcgtccacacgcggacaaaagcaagagagctcctgcacctaaaacagatatattaagttttttcttcactaaaaactcctttttaatacgataaagaactgcttcgcttccattcattaagagtatctcaaaaatcaggagtgattttagtttatcctacaatgtaaagaagcaaaataattttttagtccttatataactttgctatttttaagacatgaacgagattgctataaatgtcttgataacttaagtcttcgacacctttacgagcaataacgacaaaatcttgatgttctaactgagatgacatgtccatcagtgcatgtcgtagacgacgttttacccgattccgagtaactgcattaccaagacgcttactgactgacaaacccactctaaaatgaggcagatcacgatccagacagtagacaacaaatttccgattagcaacactgtgccctgcatcaaataatgctttaaagtctttctctttcttaacgcgataagattttttcaaaatgcgactccaaactcaaaattagtactattatatcataaatagcaaaaaagcccaaaaccttatggttagggccttagagacttattcttttagagctttttgagcttctttgatttgccatttaacctggtcaaaaccagttccaccaagggaatgacgacgttcaacagctgtatgagatttaagtgtctcatagatgtcctcttcaattaaatctgaaacttcttgataacgttcgagaggaacatcctgaaggtaataaccagctttggtacactcaaggacaagttttccaacaatctcatgtgcttcacggaatggtaggcctttagatgcaagataatcagccaactctgtagcatttgaaaaatctttctctgttgactctgccatatgtttgtcgttaacagtcattgtattgagcatgcctgcgagaatatcaatagcgacagtaatcgtttctaccgtatcaaacataccctctttatcttcttggagatctttattgtaggccaaaggtaatgacttcatcacggtcaataatccaatcaaattaccatagacacgacctgatttcccacgaattagttctgccatatctgggtttttcttttgaggcataatggaagagcctgttgaaaaagtatcagatagagttacaaacttaaactcgttagaacaccagttaatgatttcttcacaaatacgtgtcatatgcatcatgagaatacttgagtttgacaagaattcgagaataaagtcacgatcggaaacagcatccaaggaattgctatatggttttgcaaagcccattaagtcagatgtcatattacgatcaattgggaaagttgttccggctagagcagcagctccgagtggagagatatccgtatgcttgatattaaattcaaaacgttcggcatcacgtgtaaacatgttgtaataagccatcaagtggtgaccaaaagaaatcggttgtgcatgctgcaagtgggtgtagcctggcataatcgtgtaggtatgtttgtctgctagattgaccaaagtaccacgtaaattatcaagcttctcaataacttccactagtttggcttttagatacaagtgcatatccgttgccacttggtcgttacgtgaacgtgctgtatgaagttttcctgctactggtccaattttagccgttaaaagactctccatattcatatggatatcttcattggaaacatcaaattctagtttaccagccttatattcctcaagcagttcttccaagccctgtttaatttgcaatgcttcctctttggtaataattcctgtctcaccaagcatcgtaacatgggcaatagaccctttcaaatcaaactctgccatcttttggtcaaatgagattgaagcaccaaattcttctacccatttttcaagactagcttcgaaccgaccgccccatagtttatgattttctgccatagttttattttgaagattaccccacactgggataatcttccatcctttcttaatacttataacaagcaacgacctctttggtcacaataacttaaatgaaaaaagctagatagtatttgtctagcttaatttgtctctctggacacttgttttcctaaaacccgatctctgtcgtagtttatttaggctcgtgacgcctctcagaacgccttaacgataataatataagttataagaaaagagtatcagatgtggctctctgtccacttttatctgataagaagcgtttttcttctaatagcctacttttcttatgtaatctgtcattaattgtcaaatggatggttaacttgtgaattaacctgagttggaagaccccaaagcttgataaatccaattgcagcatcctgatcaaagctgtcagctgatgtgtaagtagccaagttttcatcatacaatgaattagctgattgacgtgctactacttgagcatgccctttgtaaagcttaactttagcgataccattaacaactttttgtgtttccttaatataagcaatgatagcttgtgttgctgggctaaaccacaaagcattgtagataaggtttgacaattcattttcaagaattggtttaaagtgagaaacttcacgtaccaaagttaagtcctcaatttctttatgagctgtcaaaagggcgatagctcctggacattcataaatttcacgagatttgatacctacaagacggttctcaacgtggtcgatacgtccgacgccatgcttaccagcaataacattcatttcttggataaggtcagccaatttcatttctttaccgttaagagcaactggtttcccttctttaaaggttacatcgacatattcagcttcatctggcgcagactctggtgaattggtaatcccaaaagcttcttctggagcttgattccaaggattttcaagaacaccacactcgttagcacgtccccaaaggttttgatcgactgagtaaggattatcaaggtctgctggaactggaacaccattagccttagcatactcaatttcttcctcacgagaccatttccattcacgtactggcgctactactttaagacttggatctagggcagcaatggcaacttcgaaacgaacttggtcattacctttaccagtacaaccgtgagcgatagtcgttgctcctgttttatgagcaatctcaaccaattttttagcaataattggacgactaagcgctgaaaccaaaggatatttttgttcatagtaagcgtgagcttgaagtgctggaagcacataatcttcagcaaactcatctttaacatcaagcacgtatgactcgacagctccaactgtcaaagctttgtcatggataaactcaagatctttaccttcaccgacatccatacaaacagcaataacatcataatcttttttaagccatgtaatagcgactgaggtatcaagacctcccgaataggcaagaataactttctcttttgacataatattttctcttttcttatattttcttgtggttgctatctctatcaaccttacgagattaattatattgcatatttattcacttgtcaacgcctttttgttatttttttatatttatttcgtttttatttgtttttatttattgtttcgaccttaaaagtgcttaaatcttaatttttattcaattttatgcaagaggtgatgaaaaataaaaaacacttttgaaactatacaaatagattcaaaagcatctttaactatttatcttctaaaatgccaaaaggcctgtacaaagtacagaccttttgaacaacagcatcatcggtagagaacacaacagcaattttagatagaatgaatgagggaaattattatgtttaagggactaacttaaaccatacattcttcttgctctctaaccttgattacattatagcatgcaatccccaaatgtatatcttcatttcctaaaatgtcgaatttcactcacagaatgtatttttttatcctaatctgtactaatgcccttaaaaacaaaaaaacggcttgatttctcaagcctattaatttctataaaaaagatatgtaactggacgagcggccaataaaaaatggggattaggaaaaagttatataaaagtacattatttattttcataaagtgtatgtagatttcaataagattgacgatgtctcatttccgaatcacatatcttgattatatattaacttttttcaatttaattgtctatacgatttcatagaatgtcgttttttcatcctgaactgcattttttttagtcatttttttataaatctctaaattttatcactaaaggacatctattttgtgtttttacagaatttgttcactcataagataatcaatcacctatgaaataaacacatgcttttttagactaaaaagaacattagtcatcgactaatgttcttttacctctgaccattttttaagcagagccttcattttcaaacgtgaaactggacaagaatcaccattttcaaaataaatcatcaactgagtcttatcaatacgagatatgttatccaaattaactaaaaaggagcgatgacaagaaaagagttttttatttaccgaagtaatatctccaagattggcataaaactccaaacgctctgttttagtaatcagcatcaccttatgaggtgtcacagcagtcgcaaaataataaatatctctcataaggacttggatccgagactgagcggtttcaaacacaaaaatctcatcatcatccacatctccaactttttggttcacaaaagtcaatgtttgttttagttgttgtttgaactctgcattagaaactgtcttatcaatgaaatctagtgcagaaaccttgtatttaaaactaatcggtgcaaactctgagtgagttgttacaaaaataataactgcattagcatcttgttgacgaatttctgaggcaacttctagccccttctttcgctcaccatcaatatcgatatctaaaaggaaaacctgatggttacccttttcgttgatactggacaatagtttgtgaggtttagaaaaaacttcaagttttcgtacggaaaacgtgccctctgaaaccaattctcggatgatgtcactaatacgtgtttgctgcattaagtcatcttctaaaatgtatatattcatattagggcctcatttctagtatttgcatcattttatgattctgactacggacagaaaaggaagtgttcggataacgttccaagatatcttgaacagcattaacacctataccaccctcaggatgagaaagctgggtactcatcattgaaagtggaacttgctcgtctgcaattgtactttcaataataaaactctggcagtcctcttcatcaaaataggccagactaataaaaccttcactggctttacgagcaccatcaatagcattatccatgaggtgacccaaaacaacagctaaatctaaatcagttagatagttatgaatcactggatctggaatctctgcatgaatattgaggcgatgcatctgagcttcatgatattttgatgaaagtagactatgaatacttggattttggatattatccaaatcagtgacctgagttgaaaaactatgctgatctcgattgacataaagatcaaccaaatcttttttgtaagaacgaatatcccctgttctttcgatatctctcagattattaagtaggaaattatagttagagcgaacatgcatcaagtctctatacaaaccttctaccctagtattctcacgcttcaaatcatcaagatagttagcctgcttcatggccaaatcctgctctattttttccttagcaaactggtttacagcaccaagtacaaagaggagtaagtagagatatcccattactaatggcaacctaaatctactctcaagatgtaactctggaaaataagtatcaaatgtcgacactaaaaagataactaaataataaagcaaaagaagcatgttgaccaaacccagacggttctttttttcttgttgggcagcaactttcaagatatctgtaaaatctagacgtaaaataaaatctactattctgaccgtcaacatgacgaaggaaagtggtaccatagaccaccaaatattagtgtttaaagtatcaacagttatgccaagtatcggtggaaagaagaaagtagccaaaaaacgtcttgccaaatcgactagtaccactgggtaaaaacctagaaaaaagcgctctacggaggtgacacttttattcaattggtaactaaatgtcaatgttacaatggctactaagggaggtactatgcctatatagcgtccaatgagttgtccccaaatgcatagagcaacatcaaataacaaataaagtatacgatttttaagattagtgttttgtccaccaatacgtaagtagatatcccaaataatgataaacatcaaaatttgaaataggatgttacccagcatagttatccctctcctttctacgattatagtcctaccgtgacaatttgataggttttaaataattcttttttatttgttaaaccgataccgtttgaccagcaaaactgggcaaaatcacgactaatagccagactatcatcgagtttcggatcagcttcctgattggtattctcaagaataaagctgagattgccatcctcattctgttgaataaggaaaccaatatctgtctccggctccttggcccaaagtttttcagctaagttcatgcaacgttctaaaactccaataagaactgcaatatttaaattgttaggataagcatcaacattgacatccaacctaacggtgatacctttttgttccaaaggaatgatttggtttacaatccaacttcttaataccggataaggaatctcaaacagaggagccaacttatcatttaagtccaaattatcaagtttaagatgattcaaatgctcatgataaacggataaaacttctgataattgatttttagccaatggggtctcaagagccaccaaaagactctcaaaatctttttcaataggttttacttttgtaaaaagatcctcaatatgcttattatagacttccaagttatagacataggtctccacagcttccttactacgttctctgacaaatttatgagaatagcggttcaaggttgttaccattaggagataaactgccattgcaataaaaattggccctcccacatcactacctgttgataccaaaagagtactacaagtaatgtagagtgcaaaggtcagatcaacggctatcaacagacgctcacgaccacgtgaataaatcaattccttgaccttatcaacatctgaactggaaaggtaattgatatagagaaagaatggataaatcagtacaaacgataacaatttgaggaagaagttttcttgaatctcactcaaagtcatatttgtaaacagattattgaatacataatatggagtaaaagtcgcaaataaatctgtaaaaataaccgagaaagctccaaaaaagaggcttgcccagatcgtcaaacgatgttcccgacgttcctttaaggccaaagctaaaaagataacaacttgataatagaagccatcacccttaccaagtgataccactatacctaagagacttagacaaaatactttccagtaagctaatgtgctccttgttagttttttataaataaaccaggtaatatgaaaactaataatctgaataatactattttcaagggataccatggtccaaagctgtaagttcatgataatatttcctgtttatactcaagagacattttcgtcatcttcttcaatgagttcttgacctgcctttttcaaaatatcttgataggtttgttcaataaggtcaaaatccccactatcaatacttgtctgcatactaatgagtatgttttcataatcatgtttaaacgaacgtacactcttataggcagtttcgattttttcattataagcttccagactcctcaagtgctcctcttgttctctgagaattttgctatcacgtacgtctttaccgtaggaaacaaaacgaacaagaatatacatgtgtataaggaaaccaacccaaatataaatttgagggtaacctgggagataggtctgactaagaagcaaggagaatatctcctgcttaaagaggataagaagataactgataattaaaatataatcaacttgcaagagcatgctcttatatttatcctgcaagtcctgatagggttcctggaaaaagctatctaaaccgaacattttttgcaagcctagaaagaagggaagaacaacactatctacagccaggattcctaaatggtttggaaccaactcgaccggcttattaaagaaaactcgaaaaagataaaaactaaagaaacttgtaatcagggtccaaaagacaggggtaaagaaagcataaaaatacttttcttctcgtagagcctgaggtttttcaagaaaaataaagactaggagataaattgcatctggaatatcaatttgccatagcaccttggctaaccacttaacggcagttactacgattacataaggaatgtaacggtaagtaaaaacatctagataagccattctagctaaaatcacaagatgtgaaacgacaacaaccaaagcaataaggccatcaatcgcaagttgcatatgctttccccctttctatttccctcatcctatcctccacaaatagtatctttgatttatcaattatcctgaaaagagaggacctgtgtaaaatgatggtcacaactacgagtctcaagatttacttttggatagcgattaagtatatctgcgaccttagacaaaccaagccctcggccttcacctttgctagaaaccccttcatcaaaaatccttgacacaggaatacgttcttctctggttgtattgtcaataaccaagataagataaccttgatttttaaagaaagatatagttaaagtaggatcttcagaatccaccgccgactcaatagcattatttaagaagacagaagaaatcacaaccaaatctaaggcctctatctgagttgacgatatgacatctggcaactccaagttaaccttaattcctaagttctctgcctcaagcactttagcagaaaagagactcttgagagatgtgatttctaagttgatcaaacgtgataattcataatttgacaacgttaagctattaccagatttctctaaaagttctgcatactcttgtttcaaagcaggtaagtctcgacgttggatactaacctccattgtcttaagcccttcgagataatccttcttcacctgagaaatatcattatagagtttttctaaacggtgactatattcttctaaactttcctcgtgtctagccatttcttcagccaactgatccttcactcttctcttagaataaatattaagctgagcaaagagcaaaataaagaggatggagtagacaaccgtaatactgcctgctaaataaataaagaggcctgtgtaaggaaagatgttactggcatagaaaataattaaagataaaataatataagccagagtcaccccaaccaataagcgttgtctaacttggtaagtatggttatttcccataacattgagagcaccaaagtcaataaagaacactttgacaatcagatgaaaaattgggtaaatcaagagataagacaaagcaatgagtactggggtgtctttgacctgtaaataattaatttgaaaaatccatgggaaaaagtaaagttgaagcagcttcgaggtgacttcaacaaaaacccacggcaaaaaggtgaaaagaaaagaattcttttcactacttgatattttatttaagaaaagatagcagaacaaaagtgctaagagcgaccctgtaatgcctccaacaaatagagagagcaagagactccctgcgataaaccagcatttactcttccaagttttgagtaaacctgacatatcgtgactaacaattaaaatagccaatagacgtagaaccgtaaataaaacgatcatctctagactccccccttcctttcaaaatcaacctactttattgtaacataaatatataatttagcgtcactcctattagaaaaagctaaaaatataaagctattttttcctgattgagaacaatctaacatcagacgaccccacatatcccttacttttcataaacataaaaaagagcttagaaaaaccaagctcttcaactgactcattacctctttttatgggtacatgccgataacgtagtagaaataccaaccaaatcttctcataatgctcactcctccctaatttttattaccaatctattataaaactaatttaaagttttgaaaatgatgatatgattacgaaatatcatcattatattacaaatgcagtcttatcaataatcatataatcattgacacatcacttatgtgcattcgaaaacccaacaattgttgggtttgtttttatagtgttgcaagaacttgatcaatatgtttgattgatttttcacgtccgagcaagaaaatagtatctggcaattctggaccgtgcatttctcctgaaacagcaatacgaattggcatgaagagatttttccctttgattcctgtttctttttgaacagccttaatttgtgggaaaatgttttcaacaacaaactcatcatcagacatagcttcgagtttggctttaaaggctttaagtactgttggtactgtttcaccagccataacttctttttcagcctctgtcaattctgggaaatcttcaaagaagagatctgtaagagggacaatttcttctgctgctgtcatttgtggtttgtagagttccactaatttttcagctttatctgtcaaacgaccagcttcttccaagaaaggtttgcaaagagcaaagaccttatcgaaatctgcattcttaatgtagtcgttactcatccagtccaattttttctggtcaaaggccgctggtgacttgcttagacggttttcatcaaaaagtttaatgagttcttcacgagaaaagatttcgtcttcaccgccaggattccaaccaagaagagcaatgaagttaaagactgcttctggaaggtaaccttttttacgataatcttcgataaattgaagggtgttagtgtcacgtttagacaacttcttaccagtttcagaattgatgataagggtcatgtgtccaaactcaggtgcttcccaaccaagagcttcataaaccatgagttgttttggtgtattggcaatatggtcatctccacggataacgtgtgaaatttgcatatcatggtcatcaacaactaccgcaaagttgtaagttgggtagccatctttcttctggataacccaatcaccaccgatattaccaccttcaaattcgatatctcccttaacgatatcatgccatttataaatccctgactcattaaccgccaaacgaactgtaggtacaatacctgccgcttcacgttctgcgatgtaggcagctttttcttcttcagtcatgccaaggaactcgttaatgtaacgaggagtttcaccagctgcttcttgacgttcacgctctgcagctaactcttcttcagttacgtatgacttataggctttaccttctgccaaaagttgatcaatatatttttggtaaagcggtaaacgttctgattgacgatagttttcgtgtgtttcaggactttcatcccagtcaattcccaaccaacgcaagttatcaagctgtgaacgctcaccatcttcaacgtgacgtttacggtcagtatcttcaatacggataataaatgtaccgccatgatgacgtgcataaaggtagttaaacaatgctgtacgagcattaccaatgtgtagaagccctgttggacttggtgcgtaacgaacgcggatatctttagccaagataaatctcctttttatgtttcattcttcagtctttggatacctattgagcctaaagtccctttcttaggactaacttaagatgataagtaccagtaggcaactctatcccccaaactttccaaataaaaatctagaagcgagtaccaatctttcttattatatcacaatctaggggtggttcgagaaattttgttaaaaaaacgactacctaaaggtagacgttttcgatagattacttaacgtgtttggcaagatctttttgagctttatcattagatttcgctctttctttaagccaatctttataagctgaatcgtattgtttcttagtcacaatatcatcttgagatttaagatacttgaagtagtatgtagaacctttatcaccagcttgagcataagctcctgagaatggcttaatacgagaaactacagcggctgcaccgttataagtagtcgttgggatataaagtgcactatccgtcaaccatgcctgagcttttgcatatttttcataacgagccgtcaagtctgttgtttccttagaagcatcatcaaccaattggtcatattctttaagacctactttttgaaccgcttgactatttggatcgtcataacccatgaaagatttagtattttcactatttgtagtcttcaaaacatcaagataagttgatggatcaaggtaatcaggctcccaagccacacctactgacaaatcccaatcctctgccgctgcatttgaagcagagtaggtaatgttatagaaatcatcagttgacaattggtgaagatcaagtacaacattatcttttccaagagctgattcaatagattgtttaagtgactgcacttggttcacaaagattttatttgactgattgacaggaacatccaaatggattgggaactgaaccccttctgcttgaagagcttctttggctttagcaaattcagccttagctttttctggattataaagaccatcttgactatctgcaagattcacaccagaccactcatcaccataagctggaagttgatccattaccattgttccgaagtccttaccatctgcttgaacaaagtctggtttaacatagatattacgaacggcagtactaccaccctctttaccgttaagttgtgcagcataattcgtacggtcaatagcaaaacctaatgcttgacggaaatctttgttaagaagagctgtcttagttgatgtcttttgctgatcattttctttagatgtatggtcataagtttgacgatcgatattaataccgacaccttctacagctgctccaggttgtgtatagaaaatattgtctttgtactgtttttcaactttagaatagtttgagctagttgggtatagacgagctaagttatagactccatcagtgaagttacgttccaaggattcttggtctgtaccatcatcgtaagtcaatttgactgtatcaaaatagacattatccttatcccaatagttttcattcttggtgaactcaatagatgacttcgttgtcaaagatttaagaagatatggaccgttataaagaatagatgttgggtctgttgacttaccaaagtctttacctttagatttcaagaaatcttcattaacaggccaagtaactgagtaggtcaattttgaattccagtaaggttctggttgactaagcgtatattgcaaagtgtaatcatcaactgctttgatacctacatttgagaagtccttgttggcacctgacaggtaatcattcaagcccttaacagagttttgtagcaaataaatcgcttcagaattagtatcagcagcatgcttaagacctgttacaaagtctttagctgttacattggcatactcttcgccgtctgaagtgtaccatttgacacccttacgaatcttgtaagtatatgtcaaaccatcttgagaaacagaccagttttcagcgacagaaggttttagattcccatattggtcattttcaaacagaccatcaacaccgttactaacggctgtcgtcatgtttttcttatttgtagaaacatagtctagggttgcaggatcgccaccgtaaacataattataagtcttaccagatgtcttacttgatgatgagcaagccgttaaaacacctacagataataggcctacggctgctagtaaaaataccttactctttttcattcattgcctccttaattcgcaacgtaaaaagttcaaaatcaataattatgtgtatacgtttaaattataccataaattcgaaaaagcagcactactttctgaatattttttattttctactcaaatttcgtgtctagagtaagaaaaaaaacctatccgaagataggttttttactactcttacaatgagttaggatcaactttgataccagcaccttgtgtagtagtgattgaaaggtttgtgatgtaagtacctttcgctgtagctggtttagctttttggattgcatcgttaaatgctttgaagttttcaaccaatttttcagtttcgaatgaaactttaccgatgatagcttgtacgttacctgctttatcagcacggtaagtgattttaccacctttagactcttcaactgctttagcaacgtccatagttactgtaccagttttagggtttggcatcaagttacgtggtccaaggacacgtccaagacgaccaacgattgccatcatatctggtgttgcaacaacaacgtcaaagtcaagccatccaccgttgattttagcaacgagttcgtcttcaccaacgaagtcagcacctgctgctttagcttcttcagctttagcaccacgagcaaatacaagaacgcgttgagttttaccagtaccgtttggcaataccattgctccacggatttgttggtcagctttcttaacgtcgatgttaaggttgtatgatacttcaacagtagcatcgaattttgcgaagttagtttcttgtgcaagagctacagcttcttctacactgtaagcttttgtgctgtcgattttctcaagagcagcacgcatttgtttgctttttttagccatgttaattatttctccttgtgtaatgtggtcataacgactttcatcttccacgtcactcagcgaagtgagacgacgtctgtggttttcttgttaactgaattagtcagtaacagtgaatcccattgaacgtgcagtaccttcgatcatacgcatagctgattcgatgtttgcagcgttcaagtcaggcattttagtttcagcaatttcttgtacttgtgcacgagttactgaagcaactttaactgagtttggagtacctgaacctttttcaacacctgcagcttttttcaaaagaacagcagctggtggtgttttagtgatgaaatcaaatgatttatcttcatacacagagataacaactgggatgatcataccagcttggtcagctgtacgagcgttaaactctttagtgaatcccatgatgttgattccggcttgaccaagagctggtccaactggtggagctggagtcgctttaccagcaggaatctgaagttttacgatgttttcgacttttttagccattttgtaatttcctcctattgtggttttggcggtaagtaagttttgttacctcccacaagtatgtttttacataccttatctattatacagaaattctttttagatgcaagaatttcttattaagtttaggaaaaaatttacataaaggccttttcgaggtaaaatagacttatgattctatataaattctttgctatagcatttttgatattaacacctatctttgcttttattatccaccgcttcttcagtttaaaatacctcgggcttaattttgctgaccttaccttccctctttattttattgaggtagttgctgtgtcagcccgtttcttcacccatagctttttgccatacatcaccatcttattatccttggcggctatcattatcacgattcagatgctaagaaaaacacaatctttcaagtttaaacgttttcttaagttgttctggcgtataagcttttttatcactagtcttttctatttagggactgtgattctcatttttatcgtttcttaaaaactagattaactcagcagatttattgtgtgctgagtttttttatatccaaccatgaaaaaagcaggcaaccatgcctgctaaacttttcggtattagggttgaacttgagtcattcgaccagtatctacatcataaaccgcaccggagatgataacatcctcagggataagcggtgactgacgaagaatagccatatcttcacgaacactctcttctacatctgtgaatggaagaaaatcttgatcagaaacatcaacaccaagttccttattgagataggcggtaaactcgtcgttcttaaaggtctgagcaccacaatctgtatggtgaagaactacgatttctcgtgtccccatctgttgttgagaaatgaccaaagaacgaatcatatcttccgtcacacgaccacccgcattacgcaaaatatgagcgtcacctagggccaaccccaaggcctgggcaacgtgaaggcgtgaatccatacaagtcacaatagccaccttagtctttggtttcaagggaagatgggctgtcccgtggaggtcaacataggctttgttggcattgagaaagttttcaaaataagacataataactcactttctaatgaagaaaataatttgactatcaaattatttaaacactatcttatcatctttttattaacttgtcagctattgagttcgcaatataaaaaggagaatagatgctaacaagcatccactctccttcaatttatactatgaacgttttggtaagtatctattaagcaagcctgcaaaggtttgaagattgagactttgaacataaatttcacctgttcctctaaaggtattcacaacaccctctcctgtcccaatagactgccagaaaccattttccaagtgaatattgtaatcaagtgtctgactccaggcaacgacatgagcattatcaatagtcacttcttggttgtttagctcaatttttttaatagaaccgtaggcattcgccaagagtgttccttgaccttgggttgtcatcacaaagaaaccaccctgaccaccaaaaatagccttaccaactgactggagctccattgtatagtaagctgtgccatcaagtgctagaaaggcaccgtcatttagtcggtactgtttttcacctaaataaagtggaatcacttgaccaggagaatcaggggccaaggctatataaccgttattggactgtgagacaacctgagtaataaagctactttcgcccgaaaccattgaacgcccaacggcttttacaaagcgacctagacctgatccactggcattcaatttggtactcagtgtcacatttggtgtgtgatataccatactgccacgctggataaagactgtttcaccttgattaagagataactctactaaagggaattgcatgttgctgtctgtgaaaaattgcataataaatacctccctatccttatgaaaagtatagcattggagatataattttgcaaacgttttcaaattgacttttttatcacttttttaagaaaagacttttttgagtacttctcccactgtcgtaacgccaaccacctggataccttctggaattttcatgccgtgcagagaatttttgggagcataaatcttagtaaaacctagtttagcagcttcattaatacgctgttcaatgcgagttactcggcgtatctctccggtcaagccaatttctcctataaaggcttcttgtggattggttggaagctccttgtaactagaagcaatggcaacggcaacagcaaggtcaatagccggctcgtccaatttgacaccaccagctgattttaaataagcatcttgattttggagaagaagaccacaacgtttctctaaaacagccataatgaggctgacgcggttaaaatccagtcctgttgttgtccgcttggcattaccaaagacggttggggtcaccaaggcttgaacttcagctaagataggtctgctaccttccattgttacaacaatggcagaacctgtggctccgtctaggcgttcctctaagaaaacttggctaggatttagcacttctaccaaaccaccagactgcatctcaaaaatcccaatctcattagttgaaccaaaacggtttttgactgctcgtaaaatacggaaggtgtgatgacgttcaccctcaaaatagagcacagtatccaccatgtgttccaacatacgtggtccagccaactgtccctccttagtcacatgcccaacaataaatgtagcaatgttattggttttggcaatctgcatgagttcagcagtaacttcacgaacctgagatacagagccttgaacgccagaaatctctggactcatgatggtctgaatagagtcgataatgaggaaatcgggttttatagcctccacttggctacgaacggcttgcatattagtctcagcataaagataaaattcgttatcaatatcacctaaacgttcgctccgcaatttgatttgctcggcagattcttccccagaaacatagaggacagttcccttgttagccagctgtgttgacacttgtaagagaagagtcgatttccctatccctggatctcctccaataagaaccagactacccggaaccacaccgccacctaaaacacggttaaactcgtccatgtcagtctttatgcgggcataattaattgaagagacttcttttaatttagtaggtttagacttttcacccgttaaactgacacgagcattttttacctcctgcacctcaacttcttcctcaaaagaggaccaagaagaacagttgggacaacgtcctagatatttgggtgaattgtagccacattctcgacaaacaaaagttgattttttcttagctatgataattctccttctacgcttactccagcagagtgccacttatgcaatgttttttgaaatttcctctggttggcaactccgacagcagacaaaccgacggaaacctgatagttctccttgatagccgccaaaacggaagccttaacacagccattgccatctacccctataaactctatgcttttagtaccatttccctctaaaaaatcttttaaatctggattagtaaagcaagaagcccgacgcttctcaaagatacgagaagatacaagcagcaagccggtcgcaaatttcttctttctatcttttctctcccagaaaaaacgattgagaatatagatgacccggtcgctaggatagctagcaattttgtcatttacagctgcaatcagttcttcatgatatgcttttcctacagcaacataatctgactgcatatcgattactaacaaataatctgccactttgcttcctctactgtccagtcgatccaaagccacctgtacgaacaccatcggcttcgtctccatctacaatcaagaaaggcataaagacaccttgaacgatgcgttcgccaacttcaagagtcacgggctgatcagtaatatttttcatctgggcgaagatatgaccttcattccctggatttccatagtaatcgccgtcaataacgccaactgagttgatcaaaaccaggccttttttgcgagggtttgacgaacggtcatagagatagaggacctcaccaggttgcatgtaagccttaacacctgttgggacgagaacaatttccccaggagcaataacagtgttctctgccacctttaagtcataacctgcagcatgagctgtctcacgttttggaagcaattcctgattgttatacgttgatacgagttcaaatccacgaatttttgtcattattttttcctttcgatacatctattgactagtatttgtataaactagccatgctagcttcagacttttaaatctatcctattataatctattcgaaataagatgacaaaggtaatagtctaatcactttctcattaaacgaagattgacttttaatcaggaaaacgctaacatagtattagatataatacttttaaggagaattgtcatgaaattcatcggacttgttggtacgaattcaaaacgttcaactaatagacaattattgcaatatattcagaaacattttgcagataaggcagacatcgaacttgttgaaatcaaagaccttcctgtctttaacaaacccgctaacaagcaattgccagaaagtgtccttgaaatcgttaaaaaaatcgatgaggctgatggtgttattattggaacacctgagtatgaccactcaattcctgccgttctcatgaacgctttagcttgggtttcatacggtgttttccctcttttgaataagccagttatgattacaggggcatcttacggaacactcggggcttctcgtgcacagttacaacttcgtcaaatcttgaatgctccagaaatcaaagctaatgtgcttccagacgaattcttactctcacattctctacaagcttttgatagcaatggtgatttagtcgaccttgatgtcatcaaaaaactagatgctattttcgatgacttccgtctctacgtcaaaattactggtaaactctcacatgctacagagttgctacataaagaagctgaagacttcgactgggaaagcctataggacaggagaatagaaactatgaaatttgttggactcgttggagcaaattatgaccaatcatataaccgtaaactgctcgaatttatcagaagacattttaaaataaaatttgaacttgaagttttggaaattgatgaagttcctatgtttaaccaagatgaaaaatgggacgaaagcttccaacttcgcttacttaataacaaaattacacgcgctgacggtgttatcattgcaacacctgagcacaaccacactatctctgcagcacttaagtcagttttagagtggctctcattcgaagtgcacccatttgaaaacaagcctgtaatgattgttggtgcttcatactacgaccaagggacttctcgtgcccaagtgcatttgcgtaaaatccttgaagcacctggtgtcaatgcctatacacttccaggtaatgaattcttgcttggaaaggctaaagaagcctttgaccttgagggtaacattactaacgaaggtactattaacttccttgaacaatgcttagataatttcatccaatatgtaggagtggtttctaaattgaaaaaaccaaaaccaatcgaacctgaagacttggattgtaacaacccaatcgctacaactgttactgaggtcgaccctgatgatcctgaatgggtagaaaaagtagctgaaattactggtgcggtatctggcgatacctacgtaaaattggaccacggtattttgacagttaatcaaattgacatgttcctcaaggcaatgccgtttgaattgacatatgccgatgataataaccagttcctctactacaataacgcccatcaagatcctgacactatgtttgctaaacgtgtgccacctcaatctggtagccgtatgtcaactgttcacggctcacttccaccagctcgtatgaaaaatgtagaatgggttatcggtacacttcgtaatggtaaccaagaatatgttcgtacgattgttccagggtcacctgaaggagttatcaatacgcacaactatcaggctatgtactatgatgatggttcttatgcaggaatcaatgaaatcgtctttaactttaaaccatggcttgactggtatctcgaaacaactggtcaacgccttgtcggaggaagcggtccttttgcaccagctgcagctagtcatggcggtagcgacgccacatctggtgcatcagatgcgggtggtcacggcgatgcatcttcagccgcagatgccacatccggagcatcctcatattaagacttggaaaagttgggacaaaatgtcctgactttttttcatggtcatcttagatttattttcactcgagcttgcgcatttgccatgctccaagccacacattttagaggtaaacctatgtctcaatttcaagaaaaagtattcgctgcttgtgctaaaaaagaagctctctttgatgaaagtctggggcgctatgccttgcgctctatgcttgcaggagcttatcttaccatgtcgactgctgtaggaattattggtgctgatgttatcgctacaggtattccagccctttctcgttttgtctttgcctttatctttgccatcggactggtcttcgttctcatattcaatggagagttggctacttcaaacatgatgttcctgaccagtggtgcctattatggtaaaatcaaatggagcaaggtgtgtaccatcctcctctactgtaccttctttaattttgtcggtgcccttatcttggcctggttcttcaaccaatccttctctttccaacatttgactgacaagagtttcttagttactgctgtctcaaccaagcttggaaaaacagattggatgaactttacagaaggtattacagctaatatgttcgttaatattgccatcttgggctacatgctcctcaaagaagaatctgctaaaattttcattgcgctatcagctatctttatgtttgtatttttgattaatgaacacttgattgcgaactttgcttctttcatgttgctcggtttcaacggcgtgcgtgatgctgtggataatttcactttggcaaatattctacgtcagtgggtagtcgttttcttcggtaactggattggcggaggtattttcatcggtttggcatattcttggctcaataaaactaaaacacctcacattgattaggagaccacatgcgtcaaaaaacattcatcaaacaaaccagcctagctattctactctattttatttgcctagcccttgcagtggctattgatttaatctttttcaaagtcaaaaatatgtatcatacccctgctttagcggctatctttgcaggctgggtctacttggggcttatcagaaagacaaaacaatttggagcaattacctgtctgggtatctttatgtccctctttttctttgcctctgggcactttgttctagcctttcttcctagcttgctagctggccttgttgctgaccttctagctaagaaagggaactatgagaatagtaaacttaatttactttcctatatgatcttttctctagggaacttagcacccattatcaccatgtggcttgcacccaaagcctatatcgcacagctcctagctaaagggaaaactcaagattatgtaaatcaagttatggttccctttacagccagtcatgtcctaactctgattggaggaacactcatggctgctctcattgggggctacattgcccaaaattggctaaaaaaataaatagccagcagccctcctaacagagagtacaagacaaacatgcttttcttatgttataatgagaaagaatacagtctttttctactttgttagaaaggacctaaagggagacctaatgatgaaaaaacaaaaaatcgctgtcttgggccctggttcatggggaactgcccttgctcaggtactcaacgacaacggacacgaggtccgtatttggggaaacatccctgaacaaattgatgaaattaacgagaaacacaccaatacccgctacttcaaggatgtggttttggatgaaaacattaaagcctacaaagagctatctgaagccctagatggtgtcgacgctgttctctttgttgttccaaccaaggtcactcgcttagttgctaagcaagttgctgaacttttggaccacgaagttgttgtcatgcatgcttcaaaaggtttagaacctggaacacacgaacgtctttcaacaatccttgaagaagagattcctaaggaacttcgtagtgagattgttgtcgtatctggtccaagccacgctgaagaaactattgttcgcgatatcactttgattacagcagcatctaaggatcttgaagcggcacgctatgtccaaggtattttcagcaatagctacttccgcctctacaccaattcagatgtgattggtgttgaaacagctggtgctcttaaaaacattatcgcggtaggtgctggtgccctccacggtatgggatatggggacaatgctaaggcagccgttattactcgtggccttgcggaaattactcgtcttggtgtgaaacttggggctgatcctttgacttacagcggtctatctggggttggtgaccttattgttacaggaacctctatccattcacgtaactggcgtgctggggatgcgctcggtcgtggagaaaagctagaagacattgaacgtaacatgggaatggttatcgaaggtatttcaaccacaaaggttgcctatgaaatcgcccaagaactcggcgtctacatgccaataacaacagcaatctacaaatctatctatgagggtgctgatatcaaggaatctattctcaatatgatgtccaacgaattgcgctctgaaaatgaatgggataaaaaataaaaatctaaggagttctcatgaagaatcaaaaagttagaaaagctatcatccccgctgcaggactcggaacacgctttttaccagctactaaggccttggccaaagaaatgttgccaatcgttgacaaaccaaccatccaatttatcgttgaagaagccctcaaatcaggtatcgaagatatcttggtggttactggtaagtcaaaacgttctatcgaagaccactttgattcaaacttcgagttagaatacaacttggaacaaaaaggtaagacagacctgttgaaattggttaatgacaccactgctattaacctccactttatccgccaaagccacccacgtggccttggagatgctgttcttcaagccaaagcatttgtcggaaatgagccattcgttgtcatgcttggtgacgacctcatggatatcactaatgacaaagcagtacctttgactaagcagctcattaacgattatgaggaaacacacgcatcaaccattgcagttatgcctgtacctcacgaggaagtgtcttcttatggtgtcatcgcccctcaaggcaaaggcgaaaatggacgttatagtgttgaaactttcgttgaaaaaccaaatccagaggatgcaccaagtgatcttgctatcatcgggcgttaccttctaacacctgaaattttcggtattttggaaactcaagaaccaggtgctggaaatgaagtccaattgactgatgctatcgatacacttaacaagacacaacgcgtctttgcccgcgaatttacgggagagcgttatgatgtcggtgacaaattcggattcatgaaaacatcaatcgattacgcacttaaacatcctcaagttaaagatgacctcaagcaatacctcattgacttgggacacaaacttgaaggcaaaccagctaaaaaagactaatataaaaaccatcgaatatgacattcgatggttttttcatatgacttaaaaataagtgaatcctagaagaaccagcaatagtaaaatgtaggttaaaagagctgtaaaacgccaacctttactaaataagcgactttcgaccttgttggccaaaaagatagctgcaagagcacctccaactaaaccaccaagatggcctgtaatcccaacactaggtgtaaaaaggttgaaaattaagttaatgacaatcaaagccaagtaattgcgacctaactgattaagtaaaggactatgactgtaataaccaagaatcacaacagccgcaaaaagtccaaacaaggatgtcgaagcaccagccgcaataacattaggcgtaaaaagtaaggtaaaggcatttcccataacaccagctaacaaatagagccctagaaaacgtagagtcccaaaaatctgctcagccattttccccataaagtaaagggcaagcatattaaatagaaaatgctcaacacctatatgcacaaaaattggtgttacaagacgccagaggttcagtgggctgtactgaacaaaagcaccgtacatagcccccatcttaaagaggctcaaaggcgaggtcgcttgaaagccatttaaaagatattgaaagatgaaagtcagcgtcgtaagccccaacaatagataggttgctgggtatttcttccactcatttatttgcatgtgacgacctccttaacaggaatatcatagctgtctggttgaaaatcatgtttctggcaaggataaaccgtactaacggtctccccttcaaagtcagacaaatagcgatcataataacctgctccgtaaccaatacgatagccttcatcattgaaaactactcctggcacatgaatcaaatcaatctctgttttttccacagccaaatcagacgcaggttccatcaagccaaaagaggttgcaacaagattatctgaatcataatccacaaaaatcattcgaccttgtttatatgttttaggaatcaaaagtcgtttaccatcctttaaagcctgattgattaaaagaccggtatcatattcatgaggaaaagacaaataagtcgcaatcacctgggcatctttataagcaggtaaggcaatcaattgctccaaaagatattgatctatcttagccttagtctcaggatcttgtgaagttaactgagccaagactgtttttctaagttcatttttcataggtttatcatatcaaaaaagctaccaaaagtcagacttggtagattttttagctgtatcaactatggttaggcttcagccttgtgtttaaggaattttccaatttcagccactgcaaaagcgagggcatcttcatttggactcatcttaggatggtgaagtgcatatggcgtgtcgattcccaaccagaacatgacaccaggaaccttactaagcaaataaccaaagtcctctccagtcatagctggtggacaatcgatcaggttgacctctgggctagcatcaaagaaagtcatcaactctttggccaaggctggattattttccacaggaagataaccaccttgtttcaacatgatatccacttccataccaaagctagctgccacgccctctgcaatctggcgcacgcgcttctggataaggagactcatttcctgagtaagggtacgaatagttccataaacctctgcagtttcagcgataacattgttagtagttcctgcatggaaagaaccaaaggtaactaccccaccctggatagggtcaacattacgactgacaattgtttgcacctgagtaataaagtaagaagctgctacaagggcatcattggcctcatgtggaaaggccgcatgtccacctttccccttgaaagtaacgaggacttcacaagtcccagcaaaaagggtgcttgtgttagtcgcaatatcacctaccttgaaatctggacggacgtggaggccatagaactcatctggcaaccagtctccaaaggcaccatcctcatacataagcataccaccagcttcattttcttcagccggctggaagaggaaaagcatgttatttttaggctgtacctgaagcatctgattcaaaagaccaagtgctgtagtcatgtgcatatcgtgtccacaagcatgcatacgaccttcatgagtagacttgaagtcaagacctgtttcctctacgattgggagaccatcaatatctgtacgccaaccaatagtcttttcaggagcatgcccgtgaagatagacaagaatccctgtacgccaagtacgttgctccacaaagtccttgccttcagtcatttcagcaatacgctctaagagataagcctgagttttaaattcttccaaaccaatttcaggaatttggtgaaggtctcgtctgattttaattaaatcaagtgtcatgtttttatcctttttatttgtcttattttatagagaatctagaaatagaggccctacaggcctctactatcaatatgttacaaattacgcaaagcgtcttcgagtgctgttttttgttgtgttttttcatcaattttcttgatgatacgagctggaacaccagctacaaccacattttcaggaacatcttgagtaacgatagctccagcagcaacgactgaaccgttaccaacttgaacaccttcaataacaacagcattagcaccaacaagaacgttatcaccgatacgaactgggtctgctgaagctggttcaatcacaccagcaaggactgcacccgcaccgatgtggctgtttttaccaacagtagcacgaccaccaaggatagcacccatatcaatcatagtaccagcaccaatttcagcaccgatattgattacagcacccatcataacgacagcattgtcttcgatagttacttggtctcggataatagcacctggttcgatacgtgcattaaggtaacgtttatcaagcaatggaacagctgagttacggccatcttgttccacaacatagtccttgttttcagtcaaattcgcaagaagtggttcgatatctttccagtctccgaaaagaacgttaccaagtttagtgacagaagctggaacagcagttgccaattccccttcaaaagttactttaacattcgttttcttttcagcattaccgataaaagcgataatttcttgtgcagacattttttgtgcagtcatgagattctccattcacataaagttaggaattattataccaaaaattctgataattgtctttgcttttgccaaatacagtgtatttttatgtaaaattggtctttagagcctctatatcagtaatcactcggtctggcttgattggagaattctccagttctcgacgggaataagggaaggtattcagcaagataccgtcgattccaactgcttcagccacagcaatatcagtcgttaagtcatttccaaccatgactgtctcagacgggtttaacccatgatcatccaaaacttgctttaaaaattcaggttgcggcttacagataccggcatccgaagacaagtagatagcatcaaaataaggtcttaacgccattaggtcaatctcagcgttagtaaaggctgcttgagcattagacaagagataaatccgacagccctgctcttttagaaaggctagcacctccttggtatggggataagccgtcacatgtttgcgagataagacgcgaaagaccattgctatcaattgtccccaatcttccggctgattagaattactagactgaggccgagcatctacataaagctggttaaaaatgtgggctaaatcaatttctggataagcaactcctttgagatctattaactccttacgggcctgatccacgcgcttagcataagcctttttaagaatctcgccctcataagccactccataagcctgatatagttggcctagtttatcccataacacaggatccttctcatcggttaagatatcaaccaaggtaccataaaaatcaaaaatgtagttcttataggctctatttttcatcgctttttacccattactgaaactttcttacttattgctctcatcatactccttttaggaagaccaaacaagctaactgagacatttcccatcaaaaaaatcccaacgattgttaggattgcttatcatctctaatacgaccaatcagcagttctcccgcaacagttaattgcgtcactgaagtcaagtccaaagtatccttattggcatggaagaaaagaggtgtcatctcggcaaatgtttgaacatgctctgatggcatagaccaagtcttagcaatcgtcacacgctccaaaagctcacaggactcttgaaaatgttccagaacatcctggttcgaataagcctgcgcctccggtaacaattggcgaaactctttaagatgatcctcatgaggaataactttaaaaatcaagccatgatcagacaaaagtcgtccaaattcttgataattagctggcgaaaagatatctaaaatcacatcaatattatgttcacgtaaaggcaattgagccaaatcgccaacaaaccaagctacatttttatgaggattttgacgagccgcaagaaggatagaatccttagataaatcaaaggccatgaaatccttgtcaaactcttgagccaactgacggctataatagccctcaccacaggcaacatctagaacatgcgaatgttcaggaaggtcacgcaaacgctctgaaatcacctccaggataggatcgtaatagcctgctgctaaaatctgactcctattttcaaaagaagccatatcataatgtttatctcccttagcctgtctcaaaaagttgacaaatccctgcttagctatattaaaggtatgcctattctgacaaatcaaactagactggtccaaatgcattgacgcctgacagataggacaagcaaaaagacgctcttgatctttaaaaacactaaatttggccataaatcctcctcgacacaaaaaaagagcacacacctgaaatcgcttagggctgctggattcctcccctgacccgcttcacgcacagatgttgctccgaaaaatattataccataaatcgaagtgattgcaagtagagaacttaagataagactagctagacctatcccctatcagtccctattatttccttcgatcagtctaaacttcgataaagcataagacttaccatggtgacatttatgtcactacttttttatttctcgacaccttataataaatccatagcttgaggaaagcaccaaaagctagtgacatggctgactttattgaaaggagaagccatgtttaacatatctcttaactcgtggtgagagggtatgagatttaaagactcaccaaaaataaaaaaaggagaatgacaatgattaacaaagaaataaaggtagctgacctagcctcagtaacaggaggcggatggaagaccaaccttgccattggagggctctgcctagcttcaggacctattggaactatggtatgccttggagcctacaatggctacatggactctgcacgatgaaaagaaaggacatgtgaacaatgactaagaccattaacaatcgtaaaaacatgactactcaagaacttgaagctgtatcaggtggagtggttccttgggccgctatttctgttggcattgctgctgcaaaactgacttatgaccttagctatgctgcaggtaagtctttctataacctcatccactaactaacagaactcagctgacatctcaaagattttgaggatgataactcatgaaacatacaaaaaatcaaacaaatgatactactgctaatcaatcacctaaaacgaataactatttactcgtaaaaatagctttagctggaattatcggtagcctacttttgatactcctaatcaaccttatctttcatgtacgattaggaacaccaattattgatactaatttgaagtccgcttttggtactctaatcctctttatgcctatttttcttttaacaagagaaaaagaaaaaaaatcatagaaagagtgacctaaactgccttcaggaaaacaaaaagactcttcttccattaaaaagtgcaagtccctttggacttgcacttttgtttacatatcttgccttgtttccaatttagccaatcgtttggcttcttttttgcgttcacgactctgacggaaaaagtcttgcataatcttagcacactcttcctccatgacaccagtctctacttctacgcgatggttgagacgctcatctcttaggatatcgtaaaggctacccgcaccaccaaacttttgattgcttgctccatagatcactttaggaatacgagccaagccaattgctccactacacatgacacagggttcaatggtcacaaagagggtacaatctaacaaacgccaattgcccacagtcctattggcctcctgaatagccatgacctccgcatgcatgatagcttgattgagctcctctcgtgcattgtgcccacgacctacgacttcgccatctttaacgatgacacagccaattggaatctctgctttatctagagatttttcggcctccttaagagctttagacataaaaaagtctttctcttcttgggtaaagtcaagcattagtgtcactcccgttccaagatttgcgagacaatatctcgcttagtccttctattatagcataagaatgatattccctttctaaaggacacaaaaaaagctaagacgaatcatcctagcttcaaacacattagtctggtgagtcttaggaatcacaccaatgtgttcccccaaggctagacgaaaagtcaacgaccgcttaacatcctaattcatatgtcagtcggagtgtcatagtcaattgtctgtgaaatcattatacaggcctaaggcctcacaacgataaacaaaaatgcaactgtctcaaacaattgcaaggatagcgttatagttgtgatatttcacactttccttccaaacaaataatgcctactataaaagtaacttttatagctttttccttacccatctatagtttatcatgaaacctctatcatttaatttaaaaatcggtaataaaacaatgatatacattagagacaactgttaattgtatgcattgttttgaatattttgcttaacatttaaatcgttgatatatcaacgttttaggtcttcttaaactattttttctagtctatctacactattaaacacctatcatcctaagtcttatctaattttactgtttattagtctaacaagtgtttaatgttttatctccaacaattcttcaaaacaaggtatggaacaagataatgattttttagagaggttgcttcaaagataggagacctagatagctagtcaaaggataaactaaaagggaagttcttcttccaagacgaggtcagccaagtcattatcaggattattttccctaacagcacgctgagcacgactctccagaagttggaaagaggaacaaagcacttcagtaacgtaatgggtttgaccatccttatcgtacttacgggtacgaagctccccatcaagagaaattaaactccccttgctagcataagatgctaaggtctcagccaaacgcccccagacaaccactgtaataaagtcagcctcacgctcaccattttgcgtcttatagcgacgattaaccgcaactgtgacacgtgtaaaagacctatcactagcagtttttaccatttcaggagtcgccgtcaaacgtccaattaaaataactttgttatacatttttttacctccacctatctattcgtaagcggaagtaaaaaaagtgactgattttgaaaaagcaagaataaaaataagatatatatatcacattattgaattcaattaaatagaaaaaagtaaaatctattcgggtgaaaagcaggatgagttctgcaataaatgtacttgtcactaaatattagacatctgaagatgagctgagctactagcaaaggaagtaggaagcttggtatgagctgtcgattcaaagaacagttatcgccatacaaacttgtcattagtttacttactcaaatcatcctctgctgacccagaattaccacttaaaataattttaacactccgttttgaagttgttttattgatagaagagagacgagagtcctttgccttttctttgtaagctgaaatagtttggaattcacttattgcacactaccaatgaccaatactataaaagataaaatatttcctagcacatgaaccatcaagggatagtaaatatttcccttttcattcacataaataattgaaagggctactccgccacctaagtaaccaactgcactgacccactctgataaagacaaactgtgcatatgggtcaaggcgaaaacaaatcctaccacacaaatgcttagccagcttggcaaatgtctctgtaaacaatgcaataaaatttgacggaaaaagagttcttccaccaaaggtccaatgatacaggcgaaaactgctatcagtagtggttgttctttaaaggtactttgtatattagcctcgtttagtccttgttcacttagtcccaaaatctgcctcaatattgccgatagtagtccaaagaaaatggtcaccaggacaagtaagagccagccttttaaaacccccaagaaaaattttcttttagaacttctgacctcttcccactttttgagcaattcagacttaaataagaagcaaccatacaaaaacatgatggtataaactaaataggtcgttaaagaagaaggtaagggagcatcaaatactcgtataccgtcaaaaacaaagaggactgtatagagaatcataaaaacaaggactcccttatgtttgttgtaagccattgaactttcctttcttttataatcatcaccaaatctgagtctgacagataaataaaacacaacttgattaataaacttgaagccacattttttagataattgctcgtataaagttgttttggcaaataatagagattgagagcaatactattatattttgatgatgaacttggtaagcataaagaggttctcgaaattttgaaccatttgccaagacgagctctcctaaaaaaaaaagcggtatatacttaccgccccttttactatttaccctttccagtgtttagctggatcaaaagcctcaccgactactgctgaatcatcaagttcaataataccacgtttttgtggggcatttggaagtgccaactcacgtggggcacacatcataccataactatcttcaccacgaagttttcctgggaagataagggcaccgctaggcatcatagcaccaggaagagctacaatagttttaagaccaagcgctgcgtttggtgctcctgcaacgatttggaccttcttatcaccgatgttcacttggcagatgttaaggtggtcactgtctggatgtgcaaccatttcatcaatttgtccaaccacaaagactggtccttgtgtgttttccaaacgctcttcaaagccctctttagccaattcttcgttcaagacagctacatcttggtctgacaagaaaacttgaccgttaccttcaatatcaatgaggcttgacgcttcaaaaatattccaagcaagagtcttgcctgtttcatcagctgtgacacgtgccactttacctttacgttctacgctacgtttgatgtccttagtatcttccaagataacaaacaaaacgtcgccaacttgttccttattgtatgcaaaaatcatgggttctccttcaatagttcttttatagattttaaaatcgactgacatgccaagaatcgtcattactaccatagcgataactaatcttgtcaattttccagtcactctctgttaattttacgataaattgtttatggtaccaaaagtcattcccataagaaaattcgagaaacatcttagccttactcttcataataaacttaactcgacagggctctaacacaaaatcataggtgcctggagaaccaaaagaagctgaaaaacctcttttataacagttatcagtcaagtgtttttgagctaaaggagtcaacttctctttaaattcatcaaataactccatttctccaggaatagtttgatgtgtaggaagattattttcctttttgtaagtgtttatttcttggtgttttaggaagatatcactttcaattttggaatgctctactaaaatttggcataattcttcgataatctcctcatttttttctgtcagatacttttctttagtttctgaaatatcaagagagatattaggaaagtgattgattttcatcttttaaatctccgacaaaaaggcattgatttcttctttggttttacgagctttattgaccaagcgtcccaattcctgacctttctgagtcacgacaaaacttggaataccaaagatattccaagtttgtgccaaagccatataatcatcacggttaacacgcacaaaggtcatatctggatggagggcttcaatttcaggcataacgggatagatgaactggcagtctggacaccaatcagcagtgaaaaagaaaaccaccttttgatcactttcaacatagcttgccaattcttcaagattcttaggaataatcatgcctgctcctcctcataggtcaagatatcctctgcataaacaaagctataggcacgtccatcctctaagacgatacctcctgtaagctctggattctccttatcagtgggatttgtataaaggactgcaatggtccccaggtgagataattcttgtctaatatcttggattaatgcagccttcttcatttctgcacgtgactgtctatacttctctgccattgccaagagacctaaagctcctacgcctccagcaaacaaggccaatgttttacgtttcataagaaacattttaccataattttagacgaatggggagaggctacctatctcttgagaatcgtgctaaaatagtagcaagtactactcaaggaggattttatgactaccctatttgacaaaattaaagaagtaaccgagctcagtgctacttcaggctttgaagctcctgtacgcgactaccttcgcaaaaacatcaccccacttgtagatgaggtccaaacagatggtctcggtggtattttcggtatcaagcatagccaggcagaaaatgcccctaaggtgcttgtggctgcccacatggatgaagttgggtttatgattaaggaaatcaaagcagacggaactttccgtgtcgttgaacttggtggttggaacccacttgttgtcagctcacaacgcttcactctacacactcgtgacggccgtacctatcctgtcatctcaggttcagtgccacctcatttcttacgtgctagcggtggggcttcaagtcttcccagtgtttctgatatcgtctttgatgctggttttgccaaccaagaagaagcaaatgcctacggcgttttcccaggtgatgtcatcattcctgaatcagaaacgattctcacagccaatcaaaagaatgtcatttctaaagcttgggataaccgttatggtgttctcatgattcgtgaactcttggaaaacgttaaggatcaagaactcaacaatactctaatcgctggtgccaatgttcaagaagaggttggtttacgtggtgctcatgtctctaccactaaatttgatcctgaagttttctttgcagtggactgttctcctgcaggggatatctatggtaatcaaggtaaggtaggtgatggtacccttattcgtttcttcgatccaggtcacatcatgttgccaaatatgaaagatttccttttaactactgctgaagaagctggtatcaaataccaatactactgtgctgcgggcggaacagatgctggtgccgctcacttgcagaatgctggtgttccatcaacaactatcggtgtttgtgcccgctacattcactcgcaccaaaccctttatgcgatggatgacttcctagaagcacaggccttcttacaagctattgttaagaagttggatcgctcaacagtagatttaattaaaaactactaagacaaggagtaacccatgattataggttttatcggtgtcggaaaaatggcgacagccattatcaacggcctaaatacaagctcacatcgtatcattatttcagggtcttccttggctcgttcacgccagattgcagaggaactagaggttgaagcggctgcttcccatcaggaattgttggataatgctgacctggtcatccttggtatcaaacctcaaatgtttgataaggtactagccgatctcaatttccatcaacctatcataagtatggctgctggagtgaccttggaacgcctcgcttccctcaccagtccagaccttcctcttattcgtatcatgccgaaccttaatgctcagattctcaaaagcactactggtctttgcactaatgataaggtatccgaggaccttttggcagttgccaaggaaatcacagacagttttggaaccactgttgaattggctgagaaagactttgatacctttactgccctagcgggttctagccctgcctacatctccctctttatcgaggctctagccaaggctggtgtcaaaaacggcctaagtaagcaggtcgctctgaccattgccacacagacggttctagctactgctgaaaatctcagtcttggtagcgacagtccacatgatcttattgacaaggtatgtagccctggtgggactactatcgccggtctcatggaccttgagcgtacaggcctcacccatagtgtggtttcaagtattgatacaaccattgctaaagccaaaaaactataagaaaaaagctcggaatcttccgagctttatttgatatatggcgctaaaaattgtaagagtaacaacattgaaaccgcaatactattgttaatgatatgggccatgatacagtactctaacttttgaaacttacgatatgctattccaagggcaagacccatacctgcatatacaatccaaacaccgatactattcggcatatgaacaaggccaaaaagtaaactactaacaatcaagccaacaatagaatctggattaaagacgcgtcccatgaggagcccgcgaaaaaccagctcttccacaattggtgccataattactgtaaacgttatgagaaggaagggattcatatgggcattttctatggctgcctgattggtgctattactaacaccttccatcatcatgactatagaaccaatcctagtaacgatataaatacctaggtaggtcaagccaatcataccccaggccttcagggaagaaagggccttaaagccttcgaaaagcccaagacgttttcctaagaaaagagctcctgcgctcataagaagcaagataaaaattaagagacagaccagccttatatctttgacacctaaatagatggttggaacttgatcaataattagtattaggaaagctagtaaaaaataaagaaagcgtttgagaattgaccctttgttcatgagaatccacctcttttcatcatctgtttgtacttttattataatacaacataacttatttgacaagacaaaaagaaaacgaaagaggagttttccaagataatataggctctcatcctattttagatagaatgagacgaataagggcaaatcccaatactaagccatagagcaagacagataagactgtaacatagggcaactgaagattaacaaaggcatataaggcgattaaaacaaagataagcaaaaactccagaaccagtgttgcaactgctgtcgccattaaaatctgtttatttcgctcatcgtaggcagcaatatacatccgatgaagacgtttaggatgggtaagtatagcaaaataatagattgacaaggcataaaccccaatggtaaatcccaatactaatcctagagcataatcactaagactgttagagcgaacaataaataatcccaaaatacccaaagaaaagaaagagcaggctactcgtgtaatgtatttcttaaattcggcctctgtttttctatttcctaataacatttttattaacatatcttaacactccctttattatcctttataagagcaatataacttttttcactgacaactttaaacacttatttaccttaaacgaaaagactgagtagtacacttatgctattgtttaagatatgaacacccatactgtactcgatacgcttagtcttataatatgttatcgcaagaccagctgacataataccatagatgacaattgtctgaagcgtaaatgctgagtgaccagccataaagagaagactggaaataacaagacccgtcttaaagtattttccaaagagcaccttggctaagagtcctctaaaaatgatttcttccataatcggaataataaaaccggcgactactaggtaaagatagaatggtacgtgggcaaagatagcatttaaagcatcttgattttccatagtcgcattgtgtgttaactgaccaataaaataccctagaagatcacctaggaaaaagatgacgagattaagagaagcaatcgcaacgagacgtctccaattaatctctttaagcgataagagtttaaatctataagcaatcacgataaaaatagccaaactccctaatgcccaaataccgtaacctatttgctccacaagtaaaaacttaccatcctgagtaagtagcgggaaagcacctaatagtgttaaatctaagattagtagagtgagcgctaaaacaataacaccaattttcttcatgacttgtttaaacatatcttttctccttaatcttcctcaaaaataaagacttcttcaatagtctttccaaaatatctagcaattttaaaagccagttccaacgacgcattatagcgacctttttcgagtgaaatgatggtctgcctcgtgacccccatctcatctgctaactctgcctgactaatcttattagccttgcgaagttcctgaatttttgtttccatgtggcacctcaaccttatcgtttattctcaaatagttaaactccttacttttctttgttaagttaactttacatttatagtatagttcactttacatgttttgtaaagtcttttttacattttttgtaaagttttctttacttatagaattacacataaatagaaatattcgaatgattctgtcagtgcattcaaaaaagctagccaatcactcagccaacttttctggtcttatcaaatttttgataacttatttagttttaaggcgctcaacatcacgcgcaatcaccaactcttcatctgttgggataacaaatactttaacagctgactctgctgttgtaatgtcgcctacatgtccaaagacattcttttcaggatccacttcaataccaaaccatgtgagaccatccaaaactgaagcacgaacttctgcagagttttcaccaatacctgctgtaaagacgatagcatccgctccgttcaacacaccgaagtattgagcgatgtatttacgcaaacgatccacataaagatcataggccaaggcacatttttcatcaccagcattttttccagcaatgatatcacgcatatcgcttgatttttcagaaataccaaggagacctgattccttattaaagacgtgacgaatacgctcagcatctgccatttcaggctcacgatcgataacgaatggaataatcgcagggtcaagatcccctgtacgtgttcccatcataacgccaccaagtggtgtcaatcccattgatgtgtctactgatttaccaccatcaacggcagtaattgaaacaccatttcccacatgggctgtgataatcttagtttcttcaattggtttacctaacaacttagctgcttcttgagaaacatattggtggctagttccgtgtgctccatacttacggacttggtagtctgtatagtaacgattaggcactggataacggtaggccacttccggcatagatgtatggaaggctgtatcaaaaacagcaacacttgtaatatctgggaggagctccttaaaggcacgaatccctgaagctgcacctggattgtgtaaaggtgctaaggctgacaattcttcaatcttagccaaggcatcttcatccaccaagcttgattctttgaaatattctccaccagcaaccacacggtgaccaacacctgtaatttcatcatagctcttgataatatcaaaacgaatcaaatcatcaagcaagatttttactgcctgaacatggtcagcaatatctagagtttgcgattctgaacggtcatcaaattttactgttgaaacagaatctttcaagccgatacgttcaatcaaacccttagcaagaacaacttcatctggcatctcatatagttgccatttcaagcttgagcttcctgcattaattgctattgtttttgtcataagccacctctttgtaaaacgctttcaataatatagtcctattctaacatgttttgctagaaaatggaattatctgatttccatttttggaaattctctgtaaaatctttgaggacctctgggttttgcaaatcgctaagtggataaacaaaggtctcaggagcattttcagtttgttttttaagcacaaagatagacttcatgttatgtttattgccaaaagctgcttctggaagagtgataacggcaataatatcagcatagcctgatagccatttcttaagcaaatcactttgtgggcttgtcaaaagattagttggtgccaaaagaatagcaataccatctttcttcaagtacttgagtgattgctccatgagaaggtgatgggcataggtgtgttcaccagttgctgcaaccttgaaacgactcgcaatttcatcattagggtagtaaccaacaggtaggtcactaataataacatcactctctttgagaatatgtggtcgaacagcatcttcttgaatgtaaactgcacttgaattcaccacatcagcaatactagctgacaaatcgataaggagatcgtcaacttccattcccatataattaagggttttctgactattatttagaagagtttcagccaagtttcctgtccccgaaccaatctccaaaacatctaattggtcgtccttggtcaaaccttcaagtaggtaaagaatgataaatccaatagcatcaggtgtaaactggtgattggcttgtaaggcttccaattgccctagcttgataaacaagaactgaaaagcacgacgccactcctctttgcttagattaagggcacgtaatttcttgttgtttttgatgatgacttcattagctacctcagcccccaaataataggaattttgctcaataagcgcatcgtaagcatgggttccaagatcattttcaatggtttggacattttctaacaacagctcaaaggctgtctcaattgcttcaaaattcatgatttcctccgtccttctatcatatcaaaaaggaaagagaatttctatttctgctcctgcttcttcacataacgataggtcttgatttggcctttactggcaactctaacaatcacttgtttgtccttaacctcgtaagtcgtagttccctgagaaaaactaaaagcacctgcttccttgtccgccaagtccatggtcatctctgccatgagacgactctgactggagatcatttgcgcttggttctgtctagagctagcaaccacccgctccagataaacatgcagaagaagtgtgaaaatgccagccataaaaagagcgtagagaagaacgcctcccctaacctgttttttcaaaagcataaacaaaactcctttgtagcccatttttaagagtcacttggatggtgactatctggttattttggctaattgtactagcttttacattgaaaagcatgggttggtaacctcgaccgtcagcatttgtttttcgaaaatcagtagcacttgaaagtccaaaagctaagtcttgattatcctgcttgacatagagtttgttcccctctacctttaccaactgacaaccttctaattctgcctccatttgttggacaaataggagccagtcttggttttcttgttgtttgacctgcttaacattgctcaccaatactgtagtcagaccttgataaacttgaattgaaccagcaatcaccaatagagctactagacattccaagagggtaaaagcacgaaccttgctattgagagacatgaataatctcctttcctgattcataaaccgcgataccttgctggctacgttttaccgtcactgtgatcccatttaaggtcaactgatcctgttttgtctgaactgccatggttgccacactcaagacctcctgttggtggagattcctagccattagcctacgattggtattgatctgatccaagataagaccactgacgagtactaagacagccattgctaccaaactttcgataagaatatagcctctaagagaccgtctttttatatttaccgctgcccatgttaagctgataggtcaccacctccttatcacttgaaaaacgaatctttgtgaggctagagttgcctcctttggcatcaaacactagcgtctgccccttatccagatgtatatttttaggaatcaccagacttgattttccgttactgattttatccttggacaactgcaattcaacattggacccttccgccgctgccaagcgctgactatctcggtataggtactcaaagcgcagataaaaaagattagtctcaacctgctgaaaaatacctgtgactgagcctgataaactcagagtgagaaaggcaaccactgctagagtcaccagactctccaacaaggtaaaggctctaattggccactgagcggctttcgccaccatgtttcgcatagtaatcattgtatgaatctgcctgtttttgcgtgatttgaccttctgaaacaagagctgctaaactagctgtcttattatttttcatttcataaagttctgcttgagagtccacgaccttgaccacagccgcatttccagtctctttaacagaatccttctgcttactcaagttaggaacaaaaagtaagaggagaatactgataatgagaagcacgaccagcatttcaatcagcgtaaaagcacgtaattttacggcattcaattttttcaacatcaatttcatgacatcattccttccatattttgatacattggtaatagcatagctgcatagatcattacaatcacgacagcaacaataacaaaaatgaggggttgcacaaaggttgttgccttattaagacggttaaagaaagcctgccaaacctcttcagcatagacttctaactcatagcccaacctagcattggcctctccataagcaataattaaggatagctccttagtgaaaaatgggtgagtagcaattcggtcaggaaaactctgtcctagcatcaaggcttcctctaaatcagcccccagctcacgaaaaagcttggacttttgctctttcattagagcaactaagtctagcaagtcaataccttgccctaagagatttccccattctctagcataataggcagtcgtatatagcctgacagtttggcctataaaagggatttttgccattcgtcgataaaagacaagggctgactggcgtttcacccatagatagagaattaagcttaatacaagaagtccgcacaaagtcacaaaaaagagctggggaaaaatttgaaccaactgtacagcccaattctccttaccatccccctctaacagttgaggcagaagataatttttgagccccaacataatcagaatcaggaaacccagaagtagaataggataggtcgctacctccatgagtttcttacgaaccttggtcatacgaagcatgtaggtttcaatcttggttaaactccctagaagattaccgtgcttatcagcaagggcaatctgagtaacaatattgtccgaaaaacctactgacgcaaacatctggtccaacctgtcgcctcgcattaagctcgctttcataagagacaaggacgattctttcaacaagtgacttcgctccaaaaaggctacgatttcagtcaaggtaaaccctgcctttaaaagttgtttgaaaagctggataaccttgagttgctgattaatctttaattttttccccttggatatccccttcagtgagatatccttgtttaaccaagccttccaactgctggttccagttggttgacgaatggctttggaaattttcactggcaaaatcaatcacacctcctcccttaatcagacgcatgtaggcaatcccttgaagggcattatccaactcggacttatctacaccaaggtccagaagacgctcataaacacctgccacactctttgcgtgaatagttgaaagaacagtcactcccgtcagactagctctaataaccgctcgagcagtctccttatctcgaatttctccaataatcaaaacatccgggcggtgacgcagtgatagcttaatcaaattatcataggtcatgtcaattgcttgattcacctgaagttgcaaaacattatcctgtttaatttccacaggatcctcaatcgaaatcacctgctgccccttaaaacgctcctgaaccaactcatgcataagcgtagtctttccagaaccaacgggacctgcaaagagatataagccacgataatccaaagcatccataataggctggattccttgattccagtacactaattctcgacgttcggaatgtagaacacgaataactaaactttctaagccacgataatccccaacggtagacaaacgcaaagaaaccctttgaccatcaccacaatcatagtcacaggaacctagttgactcctacgcttctcacccaccatcattcccgccacaaatttaaagtgaccaataagactagccatgaaatcaggccgatatacatcaattaatctcctctcctggccaactcgcatatagagctcataattttcctgacgtggaatgacatagatgtcttgagccccacaactatcagcatttttgatcatttccttagcaaattctgttaccataaggacctcctcatagacctattcgtaaaaagtttaagaaaatgaaaaaaagctcgaaaatttcgagcttctggattatttaacgtttaattttacagtgggcatgatttggaaggtcatttcgcttttcatatcccggacggtatttttcctcaggaatttcctgccaatcatccaaaagagcaatcgattgatagacctgcaggtattcgtcacactcctcacaccagtgcttatcctcttgatcccaaaaagcagtcatgacactactacggctgatataacttggcaaggtttcttccatcgcaaaccaaagttttttatagtacttgagggcatcgtaaaaattttcaaattccttagtactgatgatatcctcttgccatccttctacgaaccaccacggttccaaatcccctttcatttcaactacttggtacatttttctttctcacttcatctttggtgttcttattatacaaaattttctggaaaagataaaaaaaatggtcttatattttatatttatcaaaaatagaagaaattctagtcatataaatacgaaaagaacccacaattcattgtgagttcttttgctttcattttagtcttcagatgattccacaattgcttcgtcaacagcaatgttttcaataacttcaacttcgttaactgaaagtggttcaatgttacggtaacgagccatacctgtaccagcagggatagtcttaccaatgataacattttctttaagaccaaggagatggtctttcttaccacggatagctgcatctgtaaggacacgtgttgtttcttggaaggaagccgctgacaagaatgaatttgtttcaagtgaggctttcgtaataccaagaaggactggacgagatgttgcaggaataccaccagagataacaatatccttgttagcatctgtgaagtcagaaatgtccataagtgtacctggaaggagatctgtatcacctggatccataacacgtactttacgaagcatttgacgaaccattacttcgacgtgtttatcaccgatttctaccccttggctacggtaaactttttgtacttctgcaagaagataagtttcaactgacaaggtatcacgtacttcaaggagacgtttaggttggattgaaccttctgtcaaggccgcaccacggtgtacttcgtcaccaacttcaactttcatacgagctgtaaatggaacaacgtactcacccattccagtcttaccttgaacgaagactttcttagtacgtgttgcagcatcttcttcgatttcaataacagtacccttaacttcagtgataaccgcttcccctttaggattacgtgcttcaaagatttcctggatacgtggaagaccctgtgtgatatcggtatttgaggctaccccaccggtgtggaaggtacgcatagtaagctgtgtaccaggttccccgatagattgagcggcgatagtaccaactgcttcaccaacttcaaccgcatcacctgttgccaagttgataccgtaacagtgacggcagacaccgtgacgtgtgttacatgtaaagactgaacggatagttacttcttcaacaccagcattgacaatagcagcagccatgtcttcagtaatcaaagtatctggacctacgattacttcacctgttgtaggattcttaactgatttcttagtgtaacgaccttgaagacgttcttcaagtgtttccgtaacttctttaccatcagtaatcgcacggatgagaagaccacggtctgttccacagtcgtcttcacggatgataacatcttgggcaacgtcaaccaaacgacgagtaaggtaacctgaatcggctgtcttaagggccgtatcggtcatacctttacgcgcaccgtgagtagagaagaacatttccaaaacgctcaaaccttcacggaagtttgaaaggataggcaattccatgatacgtccgttaggagcggccatcaaaccacgcataccggcaagttgggagaagttagagatgttaccacgagctcctgagtccatcatcataacgattgggttcttaggatcttgtgtttcaatcagacgtttttcaagggcttctttcgcttcacgccatgttgttgtaacagcaacataacggtcatcatctgtcatcaaaccacgacggaaggccttgttaatttcttcaacacggtggtgagcagcatcgataatttcttgtttgttatcgataactgggatatcggcgatacccactgtcaaaccagcaagtgttgagtggtagtaaccaaggtctttcaaacggtcaaggaaggctgatgtttcagtcgtacgaagacgtttgaaggtttcagcgatgatgttaccaagatttttcttcttgaatggtgcattaatttccaaaccatcaataactgtttggatatcttgacctggttcaaggaagtacttatctggtgtactatctgtcaagttctcatttgttgtttcttgaagatatggaatttctgctgggatgatcgagttaaagaggatcttaccaacagttgtaaccaaaatcttgtgaagttggttttctttccaaggtttatcaggcatgctgtctactgcaatacctacacggctatgcaagtgaacataaccattacgataagccataactgcctcatcaatatccttgaagaccataccttcaccctcacggccttcttcttccatagtcaagtagtagttaccaagaaccatatcctgagatggcgttacgaccggtttaccgtctttagggttaaggatgtgttcagccgcaagaaggagcaaacgtgcttcagcttgagcttcttcagacaatggaacgtggatggccatttggtcaccgtcaaagtcggcattgtaggcctcacataccaatgggtgaagacgaagggccttaccatcaatcaagacaggttcaaaggcctggatacccaaacggtggagggtaggtgcgcggttaagaagtactgggtgttccttgataacatcttcaagaatatcccaaatacgttcatcaccacgttcaaccatacgtttagcggctttcacgttacctgcgtattcacgcgcaacgatttcacgcatcacgaatggtttgaaaagttcgatggccatcaaacgtggcacaccacattggtacattttaagtgttggaccaacggcgataacggaacgtccagagaagtcaacacgtttaccaagcaagttttgacggaaacgaccttgtttacctttaagcatgtgactcaaagatttaagtggacgactacctggtccagtaattggacgaccacgacgtccattatcgataagggcatctaccgcttcttgcaacatacgtttttcgttttgcacgatgatacctggggcattcaattcaagcaaacgagccaaacggttgttacggttgataacacgacgataaagatcgttcaagtcagatgccgcaaagcgtccaccatccaattgaaccattggacgaaggtctggtggcaatactggcaaaatgttaagaaccatccattctggtttgttaccagacttatagaaggcatcaagaacgtccaaacgacgcacagctttaacacgtttttgaccagttgctgtcttcaactcttctttgagttcagcaatttcagcttccaaatccacttgtttcaagagatcttggatagcttctgcacccattttagcgacaaatgaaccatgtccatactcttgcaatttttcacgatattcacgttctgtcaagagagattttggttcaagtggtgtttcctttggatcgataaccacgtaagctgcgaagtagataacttcttcaagcgcacgagggctcatgtccaaagtcaatcccatacgagaagggattcccttgaagtaccagatgtgtgatactggtgctttcaactcgatgtgacccatacgttcacggcgaaccttagcacgtgttacttcaacaccacagcggtcacaaacgatacctttataacggatacgtttgtattttccacacgcacattcccagtctttagtaggaccaaagattacttcgtcgaagagaccttcgcgttctggtttgagcgtacggtagttgattgtttcaggtttcttaacttcaccataagaccatgaacggaccttagttggtgaagctagtgtgatttgcatacttttaaatcgatttacgtcaaccactagtattacctttcttttgttctattgacaatagcagcgctattctcacctttatcagctaccttagcagagagtgtgaactccctctctaaagcttattttattctgttttatctgaagcttcttctttagctttttctaattcagctgcttctttggcttgttgtacacgtgctttttcaagatcatcgacgtgcatgacatcgtcgtcttcaccttcatcaagatcacgcaattcaacttcgtagtcatcctcatcaaggacacgcatatcaagaccaagtgattgcaattctttaacaagtactcggaatgattctggtacacctggttttggaattggtttacctttagtgatagcttcataggctttcaaacgtccgttaacgtcatctgacttgtaagtcaagatttcttgaaggatatttgatgcaccataagcttcaagggcccaaacctccatctcaccgaaacgttgtccaccaaattgtgctttaccaccaagaggttgttgggtaacaagtgagtaaggacctactgaacgagcgtgaagtttatcatcaaccatgtggtgaagtttgatcatgtacatgacaccaactgacacacggttatcaaatggttcacctgtacgtccatcgtaaaggattgtcttagcatcactatccatacctgcttcacgaacagtatcccaaaggtcttctgagcttgctccatcaaagactggtgttgcgatgtggatacccaagttacgagcagccataccaaggtgaagttccataacctgaccgatgttcatacgtgatggcaccccaagagggttcaacatgatatcaaccggtgtaccgtctggaaggtaaggcatgtcttcaacaggaacaatacgagaaacaacccctttgttaccgtgacgaccggccatcttatctccgaccttgatcttacgtttttgagcgatgtaaacacgaacaagcatgttaacacctgattgcaattcatcaccgtttgcacgtgtgaagattttaacatcacgaacgacaccatcaccaccgtgaggtacacggagtgatgtatcacgtacttcacgagatttatcaccaaagatagcgtggagaagacgttcttcagcagaaaggtctttttcacccttaggtgttaccttaccaacaagaatgtcaccttctttaacctcagcaccgatacggataatacccatttcgtcaaggtctttgagggcttcttcaccaacgtttggcaattcgcgtgtaatttcttcaggcccaagctttgtatcgcgtgtttctgattcgaattcttccaagtgaacagatgtataaacgtcatctttcacaagacgctcactcatgataacggcatcctcgaagttgtaaccttcccatgtcatgtaagcgacgatagggttttgaccgagggccatttctccaccttccatagatggaccgtcagcgataaagtcacctttttcaacaatatcgccaaccttaaccaaagtacgttggttataggcagtacctgagtttgaacgacggaatttttgaatagtataaacatcaagagaaccatcttcacgacgaacttcaactttatcagcatcagagtagacaactttaccgtcgtgttgagcgataactgcagctcctgaatcgtgggcagcttgatattccataccagtaccaacataaggtgctttagggtcaatcaaaggcacagcctgacgttgcatgttggcacccatgagggcacggttagagtcatcgttttccaagaaaggaatacatgctgtcgcaacggcaactacctgtttaggagaaacatccacgaaatctacaaggtgtgatgggtactcttggttattaccttgatgacgacccataacgatttcttctgcaaatgttccatcttcgttcaatttagagttagcctgagcaactgtgtactcatcttcttcgtcggcagtcaaccaaactacttcgttggttactttaccagttgcacggtcaaccttacgatatggtgtttgaatgaaaccatacttgttaaggtgtccgtatgaagacaagttattgatcaaaccgatgttaggtccttcaggtgtttcaattggacacatacgaccgtagtgcgtgtagtgcacgtcacgaacttcatatccggcacggtcacgtgtcaaaccaccaggtcccaaggctgacaaacgacgtttgtgtgacaactctgacaatgggttgtgttggtccatgaactgtgacaactgtgaagaaccgaagaattctttaacagctgcggttacagggcgaatattgatgatttgttgtggtgtcaagacttcgttatcttgaactgacatacgctcacgtacgttacgttccatacgagccaaaccaatacggaattggttagcaagcaattcaccaacggcacggatacgacggttaccaaggtggtcgatatcgtcaactttaccgataccttcagcaaggttgaggaagtagctcatttcagccaagatatccgctgttgtcaaagcacgaactttgtcatctggattggcattaccaacaattgtaaccacacgatctggatcatttggtgcaacaaccttgaatttttgaagaacaacaggttctgtaaccaccgcataatcatttggtgtgtatacaaatttgttcaaatcaccatccaagtattctgcgattgaatcaatcacatcacgtgtcatttcagtaccagcttcaacaaggatttcacctgtttcaggatctaccaaattttcagcaattgtttgtcccaaaagacgtgtcttgatgttaagttttttgttgactttgtaacgaccaacagcagccaagtcataacgacgtggatcaaagaaacgagctacaagcaagctacgtgagctgtcggcagtttttggttcacctggacgaagacgttcataaatttctttaagcgcttcatcagtacgtgaatctgctgggtttttgtggatatctttttcaatggtgttacgaaccaactcgctatcaccaaagatatcaacaatttcgtcatcacctgagaatccaagcgcacgcacaagcgttgtgaatggaatcttacgtgtacggtcgatacgagtgtaggcgatgtcttttgaatccgtttcaagctcaagccatgccccacggttagggataactgttgatccataacccactttaccgtttttatcaaccttatcgttaaagtaaacaccaggtgagcgcaccaactgagaaacgataatacgttcaccaccattgatgatgaaagtacccatctcagtcataatagggaaatctccgaagaagacttcctgagttttgatttcaccagtttctttgttaataagacggaaagtcacaaagataggtgctgagtatgatgcatcgtggatacgagcttcttcaagtgtatacttaggctctttcaattcgtaaccaacgaattccaattccatagtgtctgtgaagtttgagataggaagtacatcctcaaaaacctctttaagaccagtatccaagaattctttgaatgaatccgtttggatttcaatcaagtttggtaaatcaagaacttctttgattcttgaaaaactacgacgggtacgatgtttcccgtattgaacgtcatgtcctgccaagtcttctactccttttctacattcgagacctgctttgcaagtcgtgcactttaaatatttgtcttctgcctttttcagttgcttgtcccaataacaagtgattaaacatcaagatctacttaactgattaataataagcgaaaaaattattctgtgaatttttagaagctttaaatatgcgttacaacacttgaaaatcctaaaaataagcacaaaaatagcagctaaatctgaccgaaaaaacgttgatttaactgctgtatctcttgattggacaatatttcaaccaagtaagacgacaaatagttgtctatattatacctaattttttacttttttgcaagttttcttggcaattcctaatgccctccaagaatgctagaccaggctttttgatagtcactgtcagttccaccaatagcaaacttgtaagtcgtatctccaggtccatttttagcccagtaagtatcaaccatttcaccacttacagaaacattacgaccattgacagacactgttgctggtttaagacctgttgatttgagcacacttgccttaatggcacttgaatcgatattaaacttatctcccgttttgaaaatacctggattagcattatagatagcggaagtcaaacgagccatatattgcgcattataggtgtaacccgttttagaattggttggtgtattattgtcataaccagcccaaccaccaagagtaataccaggcgttgacacaatcaaccaagcatccgcaaagttatctgtcgttcctgttttacccatccagtccgctgaggctgctgcaccattgacatttttcaattcagaatgaaattgagttgttgctcccttaactaccacttctttgagcaagttatccatgatgctagccgtagctcttgaaaagacttgaaccccttcagatttatgctgatagataacttcgccagtccggtcggtaatactatcaatcatatagcccttctcatagacgccaccatttgaaagcatttgataggcatttacctgttgggcaaccgtggtttcaattcctccaccaagaggcaaactctcgatattgtaattagcaatcttataccccatcttggtcatgtaaccctcaacatcaacatcatgacgttgaagcatttggtaagtccaaaaggctggaatgttccatgaggtattgagtgcctcttgtaggttcatcatagctgtacctttatcaccatcatggagaataggcgttccacccgtaaaattagttgggtagttagaaaggatacttgagctacccatcaaaccttgatcaatagcaattccataagcgataataggcttaatagatgaacctggggagcgtgccgtatcaaaggcatggttattttgattattttcgtaactacgaccaccaacaaatcctagaattgctccagtcgcattatccatgagcacatttccaacttcaactccactattgccaccttggtcgaggaggccaccatattgactcgcagcatcttgcatcgcattataaactgcattgtcaatagttgtcttaacgctgtagccaccggtttggagctcttgaagagctctctcacgatagctttcctttgtcttatcatttttcaaatcttgactcgataccttgtcacgtttaacgaggtaatcatacatgacatcctgagcctcagacatgacagaatagtacaaatagtcatgacttacggcatcagacttctcaccggccttgaaatctttagtgatatcataactcttatagctttcgtactgcgacttatctagatagccaccgcgataaagattgtagagtacatcttgttgacgtgccaagccataagcaagatcctctgcgttttttaattgaccgtcagctgtataaggtgagtagacaattgggctctgtggtaaacctgccagataggcagcctgaggaactgtcaaatccgctgcagatacgccaaagataccttgagcagcctcctcaataccagcaatatttttccccttgttgttacgtccaaaaggagaaacattcagataatcggttaaaatttcatttttagaagcgcgacgctccaattgtaaggcatagataatctctgccgccttacgtttaaaggttggcgcatcgcctgttacctgttgcttgattaactgctgcgttagcgtagaaccaccacttgaagagccaactcccaaaactgatgacaccaaagccctaaaaactgcctttggtacaacacccttatgctttttaaaattttcatcctcagtcgcaatgatggcatttttgacattgttagaaatcgcatcactctcaataggtgttctcagcaagtcagtatcaatatccgcaatcttcttggaatcggaatagctcatcgaagataccaaactaacctcactaatctgattcaacaaggttttgtccttaatcgatggaacagactcaatttgactccccagataacccaaaccaattcctgcaccgaataaggtaagaacgataataaccacataaaagaaatcagacaagagctttaaggtttttaagaaaacatcacccatgtctaagagtgtcatcccatcctcaggcgacttccgtgcttgcttacgattccacttagatccagtcgtagctttcctttctttaaaagatttatctcctcttttagacctaaaaccagcaaaccttgtgcgaatagcctgccctagtcgtctaaaataatttattattttttcaaaattcatagaaatacctcaaagcctattataacaaactttgacaaagcttgcataggcctactttcttttggtataatggtgcagaatatactttactggagaatatcatgacaatttttgaagaactaaaagcacgtggcttgatttttcaaaccacagatgaagaagcccttgtaaaagcctttgaagagggaccagtctcatactacactggttatgacccaacagcagacagtctccaccttggacaccttgtagctatccttacaagtcgacgacttcaattggctggacacaaaccttacgccctcgttggtggtgcaacaggtttgattggtgacccatcatttaaagatgctgaacgtagcctccaaaccaaagaaaccgttgaaggttgggttgaaaaaatccaaggtcagctctctcgtttccttgattttgaaaatggtgacaacaaagccgttatggtcaataactatgattggtttggttcagtcagcttcatcgatttcttgcgtgacgtgggtaaatacttcacagttaactacatgatgagtaaggaatctgttaagaaacgtatcgaaacaggtatctcttacactgagtttgcctaccaaatcatgcaaggttacgatttctatgaactcaacgataagtacggcgtaaccctccaaattggtggttctgaccaatggggtaacatgacagcaggtactgagctcttgcgtcgtaaagcggacaaatctggacacgttatcacagttccacttatcacagattcaactggtaaaaaattcggtaaatctgaaggtaacgctgtctggcttgatgctacgaaaacaacaccttacgaaatgtaccaattctggctcaacgttatggatgatgatgctgttcgcttcttgaagattttcactttcttgtcacttgaagaaatcgaagaaatcggtaaagaatttgaccaagctcgtcaccaacgtttggcacaaaaggttttggctcgtgaagttgttaccttggttcacggtaaagaagcctacgaacaagctgttcacatcactgaacaactcttcgctggtaatcttaaagctctctcagcacgcgaccttaaagttgcccttaacggtgtcccaacttatgagatttcagcagatgaaaatctgaacatcgttgaacttctcgttaatgctaagatttcaccttctaaacgccaagcacgtgaagatgtacaaaacggtgctatctacatcaatggtgaacgtgtacaagacttggattacactctatcagatgcagataaaattgataatgaaattacagttatccgtcgtggtaagaagaaaaactttgtcttgacttactaatttatagctattctcactccttaatggagtgagtttttttgttgcactatattttacaatttatctaccaaaaaagagcagtaggattgattcccaactactctcttcagaacacaaaaaaccagcactaggctggttttcgagactatcacattagttatagattttgaatgcgtcgtcgtcgttttgaccaacgaatggcattgctttacgcaattcagcaccaactttttcgatttcaaggttagcagcttcttcacggtaagcagtaagttttggacgtccagccttgtagtcgttaacgaagtcgttagcgaatttaccattttggatgtcagcaagaactgctttcatattttctttcacttgttcagtgataacacgtggacctgatacgtagtcaccgaattcagcagtgtttgaaattgattggcgcattttcttgaatccaccttcgtagatcaagtcaacgatcaatttcatttcgtgaagcacttcaaagtaagccaattctggagcatatccagcttcagtcaagacttcaaaaccagcttcgataagggcagtcaaaccaccacaaagaactgcttgttcaccaaacaaatcttcttcagtttcttctttgtatgttgtttcaagaagaccaacacgtgctgcaccaacacctttacaccagtccatagcgatgtctttagcgttacctgtagcatcttggtatactgcgtaaagtgcaggaacaccaaaaccttcttcaaatgtacgacgtaccaagtgacctggtcctttaggagcacacatgaaaacatcaacatctttaggaactttgatgaattcgaagtggatgttaaatccgtgtgcgaaaccaacagcattaccagcttcaaggtttggagcaatttctgcttcgtaaagttcttgttggatttcgtctggagccaagatcatgataacatcagccaatttagttgcttctgctactgtgtaagtatcaaaaccatcttccttagctttatcaaatgatttacctggacgaacaccgatgatcacatcgtgacctgtatcacgcaagttttgtgcatgcgcatgaccttgtgaaccgtaaccgataacggcgatttttttaccgtcaagtgctgctacttttacgtctttttcatattccatttgaactgccatagtaatatgtctcttttctaaaaaaataatttattgcctttttaaggctgggttaacaaatttaagttggattttttaatcacgggtaaatccagtagcacccgtacgagcgatatttttgattccgtaaggacgaataactcgtagaagcgcctcgctcttttcagcatcaccagtcatctggatagtgatagagcttggtgccacatcaaccaccgaagcacggaaaggttgaataatcgccaagatttcagcacgtttagaggttggtgctgataccttaactaggataacttcacgttccaagtgtggctgatccgtgatatcacggatgcgaatcacatcaatctgacgattaagctgtttgatgatttgttccacttcattttgagtattcacatcaataataatcgtaatacgtgaaacgttaggatcctcagaagcccctacagagatactttcaatattaacttgacgtcgtgaaagaacacctgtgaagcggttaaggacacccgaacggttctgaagtttagctgttaacattctacgcattgaacttcacccccaacatttcgtgattactcttaccagccggaacgattggcaagacatgctctttacgagagatatccacctcgatgaacattggcacgtcttccttgataacttccaaatcctgatcaattgtctctggattatcaaacttgtaagacttaatgccgtaagcttgagccatcaattggaaatctggaagggtatcaaagacagactctgatgtacgcccttcgtagaaggactcttgccattgacgtaccataccaagtgagtggttgttcaacataacaaccttgattggtaccttgtaaatatttaagatagccaattcttggttcgtcatttgaaaaccaccatcaccaacaaagaggataacttctttatcaggattagcaattttggcaccaattgctgctgggacaccaaatcccattgttccaagaccacctgaggtcaccaattgacgctcattttggtatggataatactgagctgtccacatttgatgttgaccaacgtcagtaacaacaacggcgtcacccttagtcaattcaccgatacgctcgataactgcctgaggctgtaccatacgttctttcttatcgtaagaacgtacacgctctttgtcttttgtgactttttcaatccatttttcagtgttattctgaaccactggctctgccaagagcatttcaagagcttgcttggcatcaccaacaactggaaggtccactgcaataattttaccaatctcagctggatctacatcaatatggacaaccttagcattcttagcaaatgttttaggattacctgtcaaacgatcatcaaaacgacaaccaatagcaatcataaaatcagcatccgtcatagtaatgttagccgcatatgaaccgtgcataccacccatacccaagaaaaggggatgactagtagcaattgtcccttgtcctaaaagacttgtgacaactgggatttggtagcgttctgcaaaagcaactagctccttagcagattcagaataagataccccacctccagctacaataaccggcttcttagctttacccaactgcttcaagattttcttgatttgcatttcgtttggtcttagcgtcggttggtaacttggaagattaatttcaggatcgttgatgaaggctgtttccttagccacgacatctttagggaggtcgataacaactggaccaggtcggccagttgttgcaatatgaaccgcttccctaataatacgaggaatatcagctgtatcgcgaatctgataattgtattttgtaatcggcatggtaattccgacaatgtcagcctcttggaaggcatccttaccaatacctggtgttgcgacctgaccagtaaagactaggagaggtacgctatcactcatagcatctgcaatccctgtaatagcattagtggcaccaggaccactcgttacaagagcaacaccgagtttaccagtggatttggcataaccttcagcttcgtgcagacttccttgctcatgacgagataagatatgattaatcttgtcatttttgtaaatagcatcatacaaaggaagaaccgctccgccaggatatccaaagatagttgaaatcccaagttcaagaagtgtatctagaattaaatcagcaccagagcgtgcttcttcaagttcaattttcttcacatggacctcctttagtagttgtttttttcgaattgtctaaaaattcaaaaccttgtatactatgataacatttttaaccaaatttgcaagggtttcagagaaaaatatcacaaactcttcggaaagaatgttcttattttttttcttgtgcttgacgttctgctttacgttcttcgaattcttcgtcactcatcaaagttccgccaacattggccgatttagcaaaggctgtatagcgacgcaaccaaccacttgaaatttttgatttgaaaggtttcaaatgtttgcgacgttcttcaagggttgcatcatcgacaagcagatcaagggtacgatttggtaggtcaatcacgatttcatcgccatcttcgattagggcgatattaccaccttctgctgcttctggagaaacgtgaccaatagcaataccacgagtagctcctgagaaacgaccatccgtaatcagagccacatccttaccaagaccgcgtccgacaatcttagaagttggtgccaacatttctggcataccaggtccaccctgaggaccttcgtaacgaatgacaacgacatggcccttcttaactgttccattatcaatcaactcaagggcctgattttgtgaatcacaacaaatagctttaccacggaaagttttaacagatggatctacaccaccgaccttgataacagctccatcctgagcaatatttccgtaaaggatagacaaaccaccaactggtgagataggattctcaattggatggataatttcttcattcttgatttcagcaccagctacgttttctttcaaagtcttaccagtaactgtaatacgatcacccttaatggctccttttttaatcaactgattaataatggctggaactccaccagcttcatggacatcatgcatagtgtaaacacttgaaggtgcaattttagagagataaggtgtcttcttggcaatctcgttaatgtctttaagatcatagtcaataccggcctcacgcgcaatagcaagcgtatgaagaacagtattggttgaaccacccatggccatatctagagcaaacgcatcatcgatggcttctttggtcacaatatcacgtgggcgaacattatttttgatgttatccatcaattttgtggctgcttgacgaaccaattcacgacgttcatctgaaacggctaggatagtaccgttacctggaagggcaaggcccaaaacttccatcaaacagttcattgagttagcggtaaacattcctgagcatgaaccacaagttggacaagcatttttctccaaataatcgagctcttccttgctcatatctccagcctgataggtacctacagcttcaaacaaacttgatagcgtcgcttgatgaccagtcatgtcaacgccacccttcatagggccaccagaacaaaatactgctggcacattagtacgcatggccgccaaaatcatccctggtgtaatcttatcacagttaggaatgtagaaaaccccgtcaaaccagtgggcattaataactgtttctgcagaatcggcaatcaattcacgagatggaagactgtaacgcatcccaatatgccccatggcaatcccatcatccacaccaatggtattaaactcaaaaggaataccgccagcctcgcggatggcttccttggcaatatctgctaattcacgcaagtgaacatgccctggaacaatatcaatataagagttacaaatagcaatgaagggcttttgcatatccttggcagatttaacttgcccagtcgcatacaaaagtccgcgtgctggtgccttatcaacaccaactttgatcatatcacttctcatgatgttaccttcaatctataaaatttcttacaacatatgttaccactttggaaagtaatgtcaaggaattttcagaatatttctgtaatttcgaaaagatgtcccaaccgtatcaaaactgacaaaacaaaaaggaagccctaagacttcctaaatgattatttcaatattattcaacactaaagaggtatggataaactggttggtctccttggaagatttcaacttcgatatcttcgtgagcctcttccaatttttccgcaagtgcttgagcttgttcttgattaccttcttcgccgacgtaaatcataacaatttcactgtcttcgtcaatcatcttgtcaaaagtgtcaagaagggcttgatccatatctggtgtagacacaaggattttaccatcaaccataccaaggatatcattttcatgaatctcaagtccgtcaatagttgtgtcacgtaccgccaaggtcacgctaccacttgttacatctgaaagactagctgtcatagcttcaacgttcgcttcgatactttggctaggatcaaatgaaagcaagcttgtaaagccttgtggtactgtacgcgtttcaacaacagccgcattgacatctactacttcagcagctgattgtgctgccataaagatgtttttattgtttggcaagatgataacattcttagcattgacctgctcaatagccttaacaatatcttctgttgatgggttcattgtttgaccacctgaaatcacatagtcaacaccttgtgatttgaagatatctgcaagcccatctccagcaacaactgcaataagagcaaagtctttaggagcagaaggtgcagcttggatagcttcttctttttgaacttgtgcatcgtgttggttacgcatgttgtcaaccttaactttgacaagagccccatatttaagaccttcttgcatgacaagacctggatcctcagtgtggacgtgaactttgacaatttcatcgtcgttaacaacaaggagagaatccccaaggttactcaagtaatttcggaactcttcatagtcaaagtccttcacataagttggaccttgtttgagaccaatcatgatttccgtacaataaccgaaggtaatgtcttctgttgcaacatgaccagcaactgacttatgatgttctgcattgatcatctctgtcatcgtagctggtgtcgcttggaagtcctctgaagcgatatactcacctgtgagggctgacaagaaaccttcataaatgaagaccaaaccttgaccacctgagtctaccacaccaacttctttcaaaactggaagcatctctggtgtcttagccaaggcagctttagctccgtcaagagctgcacgcataacctcaacagcatcatttgtagattcagctttcttaatcgctgctgaagctgcaccacgtgatactgtaaggattgttccttcaacaggtttcataacagctttataagcaacttcaacccctgtttggaaggcatgagctagatcttggccgtcaagttccgttttgtccttgatactttgaccaaatccacggaacaattgtgacgtgataacacccgagttaccacgggcacccatcaaaagacctttagacaaaatctgaccaacttcaccaactgttgaagctgattgatctgcgacagctttggctccgttatccatagtcattcccatgtttgttccagtatctccatctggtactgggaagacattgagtgaattcacatattctgcttgcttacctagacgtgttgctgccgcttggaccatctcctgaagcaagcttgttgtaattttagacactagttttctcctacgactttaatattttgaacgtaaacatttaccgtttcagccttgataccgagttgattctcaagattaaatttcacacgttcttgaatattttttgaaacctcactaatcttaacaccgtaactcataacagtgtagacatccacagtgatacctgcatcagtagatttcacgacaactccttttgcgtagttttcttttccaagaagtgcttgaaaattatctcggatagcactcttacttgccataccgacaacgccaaaaatttctgttgctgaaccgccaactactgttgcgatgacatcatctgacaattcgatttgaccatcttttgtattgatttttacagtcataattactacctcaaaaagtttttatcagcttattttaccatattcgagcctacttgtaaaaaataagaagaagataccctttgaataagagtatctcctcagtatttatcattaaaactttctctttacgagataacgacggtacatcacgtagaggaagatcgcacgccatacattatcaacaacggttgcaatccagacaccagcaagacccattcccagactcaccccaaggaagtatcctgagaaaattcgaataatccacatcccaatagttgtcgcatagaaaggcatcttagccttacccagaccttgccaaactgctgtgtaaactaaagtccccgaagtcacaggattcccaaggaaagaataaagaataactacctggctagccgcaatagctgctttattatctgtaaagagacctgataatccttggccaaagagcaagatactccctgaaaccagaaccatcaagaaggtggaaatccaataagactctcgtataatacgcttcatctgcgtcttatcccctcgacccagactattggcaaccaagataaccgtagccgtagcgactcccataccaggcatatagttaaactgagtgaggttttcaccaatggcgttaccaccgacaacggctgtaccaaaggtaacaataatagccacgatgaccacatctccagcacgcatcatcagtcgctcacctgctgctggcagggcaatgcccaacaaatctctattaaaaggtttggtaatttcaagctgcttcacatccagtttcatcgcttgccagagtatcactgtcccaaccagacgagagaaaaccgtagccgttgcgaccccaataatcccccaatgtcccacaaagatggctaaagaagataaaatagcatttagaacattggtcaaaagactgatgaccatggaaatacgaggtcgtcccttggcccgtaggatgttaccaaaagtggtcatcaaggctaggaaaaccactcctccaccgacaagagcaaggtagagactaccagcctgagtcacagattgctcagtacctaaaagattaagaatggccccaccaccaaaaatggaaagtagaccaaggatgagactaagagcaagggtaataataatagcatcccaagtgtctcggttagtcgctttaacatcaccttttcctaaactcctggcaatgacactggcacttgaggctcctagagcaataaagatagcttggtaaatcgtaatgatattattggctacggaaacccccgatatagcgacaatacccacctgagccactaggtaagaatcgacaacccccatcaacatttgtagaaggttttcggccatagcaggcaaggctatgtttagaattttctttgtttctgtcataatattcttttctatattgataaaaatagggctgatttctcagctcctatttttttattcttatacaccaagatagctttcaactgctttttgcatatcagctgccgcaacaactgttttatggcgaacttctgcatgttcaagtccatctacagcagctgggatagctacacctgaaagttggtgcaaatcttctactgccttgaaatcattcccactatctttaccagtgacagctgaaactgccacacgtgggaatttgtatgggctagctgttgaagcgataactgttggtgtgtggtcatctgtcttttgaacatatgcttcgtaaacagctgaggcaactgctgtatgaggatcttcgatatacttgtcttcatcatagacacgcttgatttcagcagctgtttcatcctcagttgcaaaacctgctgcaaacaaatcaagaatatctttatctgcatcagccaaagtatactcacccttagtcacaagtgcatccataagctctttagtcttagtagcatcattaccaagaaggtggaaaatcaaacgttccaagttagaagataccaagatatccatagaagggcttgttgttaccttgaagtcacgtttcttatcataagtacccgttgcgaagaagtctgtaaggacgttattttcattagaagcacagattaatttgccaactggaacaccaatctgacgtgcataataagccgccaagatattaccaaagtttcctgttggtactgtgaagttcaccttatctccgttttggatatgacctgccttaaccaactgtgcataggcatatacatagtaaaccacttgtggtaccaaacgaccaacattcattgagttagctgatgagaattgcgtatgatgagccaacaatttctcacgcaaatcaacatcattaaacatacgtttcacatctgtttgggcatcatcaaagttaccgtcaatggcaataacgtgcgtattagctcctgtttgagtggtcatttgcaattcttggatttttgaaacaccgtcttttggataaaagacaatgatttcagttcctggaacatctgcaaaaccagccatggcagctttaccagtgtcacctgatgtcgctgtcaagataacgattttattatcaacaccttgctttttagctgatgttgttagcaagtatggcaagattgaaagggccatgtctttgaaagcgatggtagaaccatggaaaagctcaaggttgtagtggttcttaagtttaactactggtgcaatggcagctgtatcaaacttgtcatcataagcatttgtgatacagtaatccaattcctcttcagtaaaatcatccaagaaagctgacaagaccaatttagcaacttcttggtaagaagcatctttcaattgatcaaagtccaaagtaacctcaggcgttgacaacggtgtgaacaaaccaccatctgttgccaaaccttgaagaatagcctgactagctgttactttattattttcgtcacgtgttgattggtatacaagtgtcatggtaaatcctctttttagatagtctgtggctctattgtagcataattgtcagaatatttctacacgtattgtgacttgtgagaaaatcatccggatatcaccttattctttcctctcaaagacatgaaaaaatccggaatagctattccggatgtcatcttaaaatttatctttggtgtcattcttagttgagaaagtaatatcttttgatttgccatcaccactaagcgttactttcttatcttttttagtcacttttagctcttggccttttttcacattgagaccatcaatatcaacgtctttgttgacagaagtaacagtcatcttatgtcccaaacggctaaccttccctttgaaaagggttgtcgttgtttcgcctgtcttcgaatcatacttttgaccactgtctttcgcagctttttcaagagcttcatcaagttctttttctatggtttcctcactgtaatagttttcaaaggaatctccataaaaggctttaaataaatctccaaaggctgagaaggacttctgaaccctctcacgatagtccttgatataagttttcttatcaaaagtatagctagcagtaaccttcgcattgctaccttttactttcatggttacagcagtatctgtaaagtacttttcaagctccttactatccaagtctgtcaaactttcagacatgcttgaactatactctctacctagagaactactgtaccatttgccatcaatattacctgtcacataacggtaagtcataaagccaccgatacataagaagacaaggactaccgctgacaaaactgagactaggatgcgttttttctttttgggatccatttgtttcttaggagccaaatttgccatagctgcttgcccttctggaaaagcaaccgtagaaggtgcagttgctgttactactggtgccgtttctgttggtagaggactagtgcttgtctcgacgatttctgcctcaaccttaacaggttcagtagtaactgtatcttcagctttagctggtgcttcattaacaaactctccagctttcaaagcatccgccatttcctgaacactcggcttacgtccgtttaccgtctcaaaatagtccaaccattcttctcttgtcatttatattcccctttaatttccttttttatttattttttgtaaagctaatgtcaccaaattcactgtgtgccttgatagtaaaaccttcattgttgggcgtataatctaatacatcaccttttttaaaagcatctgaatctccagccttatccacagtgattgtttgctcccaacggttaatatcacccgtgaaagcagttgttgtaacacgaccggttttggcatcgtaggtataactctttggaagttctttcttcactgtctcatcaaactgtttatagtagtctttttctgacaatgaataactatcaaaaacctccgagaactcctcgccatactgacctttcaattcagtaactctactctggtaagcctgataaagacctttacgattgtaaacaaagctcacttttaagtgagccttattgtcagtaatactcattgctgtattgatatcggtgataagattttgaccttgtggtaaagcattactaactttattcttagtagtagcagtatcttttagagtcgctaacattttctcactaaaggtcaggcttgtccactcgccctcaatgctggcagctcgataacggtaacccattacgatacaaacaatcaaaaggatagtgagtatcgctgcaataacacctgataccatccccacaatattctttgaggttactggctcctttgattcttttactttttgactaggattgaattgaacactcaccatcctatcagcattaaactctttaaacctattagtcgctctattccctgctgtagaagccattggtggcctcaattcatgaggcttgagaggatgtgctgtttcacccaaactaagcccttcttcttttgtcataggaatctccttatcttgctgtaaggttattataacaattcttaaagcgtttttctatcttatccgggaaagtcctttatttttaatttggataaacactctaatatagaggatttctagcaaaaaaagtagcccttatagagctacttttgtctatcgcttaccctttgtaatcaaaggcaatttcgataatttctttcaattctgaaataagtggttctttcggattagctgttgtacattggtcttcataagcatgttcggccaaagtataggcagtgtcttgaagaagtttcttagtgacaccttgtcccttccagttcatgtcaataccaacggcaacacccaattcgtatactttttgtgccaaaacttcaaccaattcagcatctgattgtttgtcagtaccccatcccatgaaacgagcgatatctgcgtaatctttgtctgcacggaagtagtcatatttagggaacatagcgtgtttttgaggatcacgaccgttgtaacggataacgtgaggcatcaaaatcgcattagtacgtccgtgtggaatgtcaaacataggaccaaccttgtgagcgagtgagtggttgataccaaggaaggcgttggcaaaggccataccagccattgttgatgcattatgcattttttcacgtgattcttcatcaccaaagcggtaagaatgttcaagattttcaaaaacaagtttaattgcttggagtgaaagtccacgtgtatagtcgctagccatgactgatacataagattcaatggcgtgagtcaaaacgtccatacctgtatctgctgtaacgctagcaggcacactcataaccaaagcagggtcaacgatagcaatgtccggagtcaaagcatagtctgccaatgggtacttgatatgagtttcactatcagtgataacagcgaatgacgttacctctgaacctgtacctgaagttgttgggatacagataaatgttgtcttctgagcgtaaggaatcttgtaagtacgtttacgaatatccaagaatttttgtttagcgccgaagaaacttacatctgggttttcaaagaacatccacatagccttagcagcgtccattgcagaaccaccaccaagagcgatgataacatctggttggaagtctacaaagcgttccaaacctttgtaaaccgtattcgtagatgggtttggctcaacatccgagaaaacatctactgctggtctgtggcggttaagttccaattgacgtttaaccaagtctgcataaccaaactgaaccataccagggtcacaaaccaacatcacgcgctcagcttcaatgtgacgcaagtaagttattgaatctttttcgaagaagatttttggtgggacgcgaaaccattgcatgttattgcgacgctttgacaatgttttgacattcaagagatcaaatgagctaacattgtgtgacactgagttatgaccgtgtgaaccacaaccaagagtcaatgatggaatcatgttattgtagatattaccgataccaccttcagctgatgggctatttaccaagacacggcaggctttcatgcgaataccatattggagttggagctcttcattttcagtgtggataacagctgtgtgtccaagaccacccaaattaagcatgccttctgcttttttgaaaccatcttcaacgccatcagatttgataagagcaagtactggagacaatttttccaaggcaagtgggtgctccattgttgcatctggaatttctgccaaaagcatttttgtacctgcaggaactttaagaccagctttttcagcaatttcaatagctgagtgacctacaatggcaccatttacagctgtacgagcttcattaagaacaactttttccaatttagcaatgtcagcttttttagaaatgatgacacattgatgtgcttcaaattcagccttaacttcgtcatagatagctgcatcaacgatagctgcttgttcagaagcacaaatcataccattatcaaaagtttttgaaacaatgatatcgttgacagcacgtttaaccttggcatcagcagcaatataagatgggacgtttccggctcctacaccaagcgctggtttaccagttgaataagcagccttaaccataccaggtccaccagtcgcaagtactgtggcgattttaggatggttcatcaaaagaccagttgcttcgatagagggctcttcaatccactggatgcagtccttaggtgcacctgcttcaatagctgcatcacggacgatacgagctgcctctgcagatgatttctgagctgatgggtggaaggcaaatacaattgagttacgtgttttcaacgcaatcaaagctttgaaaatagtagtagatgttggatttgttgttggagttaccccacagataacaccgaccggctcagcgatagagaccaaaccttgctctttatcttcagcaataacaccgactgtcttgtcatttttgatgctattccaaatgtattcagaagcatacatattttttatagctttgtcttcataaataccacgacctgtttcgtcaacagccaattttgcaagatacatgtgtttatctagggcagcaatcgcagcttggtgaacaatatggtccacttgctcctgtgtaaagtcagccatttcattgagggcttcaaccccctttattgccaattcatcaattactgtttgaatatctttagtttgtttaatttctttagtcatataaaactccttttaagcacttgttaaaaaaatcacaagcttttgaacaatattattatagctctttatccaatctttgtaaacccttacaacgacaaaaaatgatgaaatccatccatttttggacagatttcatcattattaccaaataatcacacgatcttctggggcacgccacatgccgtcaccttctttgacgtcaaattccttgtggaattcgtcaaagttgctcacgataacattggtgcgccatttagctggagcgtgcacgtccacgctagccaacatttgcatgtattcttcacgtgctttcatacgccagattgtcgcaaaattaacaaagaattcgcgaactgaaaaatccttatctcgtttagctgcttctaaggcacaggctacaccaccgaggtcagccacattctcagaaacagtcaatttaccattgaccttggcaccataagagtccaagccctcaaactgatccacaatcttgtcagtacgttccttaaaggctgtatagtcttcttcagtccaccagttcttaagactaccattctcatcaaaggaagctccgtttgtatcaaaggcatgggaaatctcgtgagcaatgacagcaccaataccaccatagttggctgatgacgattggtgaaggtcatagaaaggtgcttgaaggatagctgctgggaaaacaatttggttctgctgtggatcatagtaagcattaaccatgtgggcaggcatatgccactcactgcgatcaactggttggttccacttactccagctatgagcaattgaaatttcgactaacttctgtgcattctcaacaagtgacaagttctcatcaataatcttcttatcatatgtctcaggtagtttttctggataaccgatatgaggcgtaatgacattaagtttcgtaatagctttttcacgtgtttccggtgccaaccaatccgctgtttgaaggcgtgatttataaacatcaatcatggttgccactttggcttcaacgtctgcttttgcttctggtgagaatttttcacctgcataccatagtcctagagcttgattgtaagggccttgtgccaaatagtaggctccttttttcttgtcccaggcttgtggtgttcctgaaagcgcacggccatattttccaaatagaacacgaagttcgtctgtcaaataggcattccaaattgtcgtagcatcgataagtaggctcgccttaagtagctcccaattatcttctgaataatattccgccgcaaattctgtccagaagcgctcttcaggaacgataactttatcaggaacttgtcccaagatttctgtgaagatgttatcaagtgggagttccggtgctagcttggtaaagtcttcccaatcatatgggtggtagagttccacatactcggaagattcttcactcgaaaggacatacttggccaacttagcatcaagggcgataaccttgtccaagatatctttgatttcttcagctgtaaagccatatttctcaaggagttcttcttccatttcacgccaaattcctaaaagctccttgcccttctcattatcctcagtgtaataggttgtatcaggtaaaataatacttggcgctgctgcccagaggacatttaattgagcattcataaagtctggagatacaccgaatgggaacgcattaggtttaccagacatctcgtactcagcaattttcgaagcaaattctgagaatgaggaaagcttcttgtattcttcaatccaaggtttaacaggctcgatacccaatgcctcacgtttgtcaaagtccgcagccatacggtgaaactttataaagttttgtagaatggcattgtcaggaacattctctcctgccaaccattgatcagttgtttcaagcatgaggtcttcaatttcatctgctaaatctgagaaaccacctgtacgtggtttgtcatctggaatcactgctgtcttttcccactcaccattaatcgcatggtaaaaatcatcttgtaagcgtgtcattacacttcctccatcaacattaaaagtgctttcattataacaaaattccccagcaaaagcatttactgaggaaagtttgtcttatttaactaaaattgctagggtttgataaggcttaagacttaccttttcagcaagctctgcatcgtcatagtttgacaagagtacgcgccctaactggtattctgctggaatctccacttcagcttcgcttccatagaaattattgagtaccaagagtttttgaccgtctaaatgacgctcaaaggcgtagacttgttgactatcttcaagtgctgactgatagctgccttctgaaatgataggcatttctttacgcaagcgaatcaattctttatagaatttaaagattggtccgtcgatttcattttcaacgttgatgtctttataagatttaccagctttcaaccatggagttcctgttgaaaaacctgcattttcagaagcatcccattgcattggtgtacgagaattatcgcgtgatttggcttggataatcttaaaggcttgctcaggagacttgccttggtccaagagcatttggtaagcattgatggactcgacatccacataatctgccatcgaatcatagtctggatcaatcattccaatctcttcgcccatatagatatacggagttccacgtgacaagtgaatgctagctgctagcatggtcgctccttcattacggaagttcttgatatctaaaaagcgattcaaggcacgaggttggtcatggttattccagaaaagggcactccaaccaccacgttcactcatttccttgccccaagtatgatagagacgcttgagctcttcaaaatcaaatggagtaatagtccatttttgaccatcttcatagtcgactttaagatgatggaagttaaaggccatagacaactcgtggcgctccggtgctgaatacaaaacacagttgtcaatggttgtcgatgacatctctccaactgtcataaagctatcatcagaaccaaaggtcgcttcattcatcatacgaagatagtcatggacaattggtttatccgtataagctggtttcccttcattttcagggcaatccaccaagacctcatctttcccaatcaaattgattacatcgaaacggaatcctttgacgcccttgtcacgccagaagttgaccaccttgaacaactccttgcggacattgggatttcgccaattgaggtctgcctgtgtttcatcaaagaggtgaagatagtatttccctgtatctccaaaaggagcccaggcagaaccaccgaatttagacaaccaatcggttggttggtcctgaatgaagaagaaatcttggtaatacttatccccagccaatgctttttggaaccactcatgctccgttgagcaatggttgagcaccatgtctagcatgaaatcaatcttgtgctctttcccgacacggaccatttcttcaaaatcagccatatctccaaagacagggttgacagcagtgtagtctgaaatatcgtaaccattatcacgttgtgggctcggatagaaaggattgagccaaaccatatccacgcccaactctgctagataaggaattttttcaatgattcctctgaaatcaccgattccatttcctgtagtgtccttatatgattttggataaatttggtatacaacctttgttttatctaatgccatttatttaacctcttttttatcaaagggtggaccgtaacgtttccaccccttagcttattttgttcgatgagcaatcatgagaacttcaccacgtttgatatcacgtggaagatccccttcaacatctgcttggaaatcatcttgatttgtaatgattactggagtctcagtgaccaaaccagcttctttgataacatccatatcaaaactaatcaattgttgaccaacaacaactttatcaccttgttcaacatgagcctcaaacccttttccgtcaaggctaaccgtatccataccaatgtgcattagcatttcaacaccttcttcagaaacgatacctacggcgtgcttagttgggaagagtactgtcactgtaccattcactggtgaaaccaattcaccttgacttggttcaatcacgacaccttgtcccatgacacctgatgagaagactgggtctgtagcttggctaagtggtttcacttgtccagcaagtgggctcaccagttgggctgttttaacaagggctgttggttctgcatgaactgcaaattctgcttcttcttgagccgcgaattctgcttgaagctctgtgctatcttctgtttttgtgaagagtccagccttgcggaagaagaaggtcaagaccataggtacaatgatagcaacaagcataattcctgcaaatggaatcatatacttaggttgaattgatagaataccaggcaacccaccaataccaatagaagccgctgtaacgttaaaggttactgatagaagacctgcgatagatgaaccaatcatacccgcaacaaatgggtaaatatatttgacgttaaccccaaagagggctggttctgtaacaccaagataagctgaaatagtagctggaagtgaaatttgagcctcacgttcatcatgacgatgcataatatagtaagcaaaaacagctgaaccttgagcaatgtttgatagagcaatcataggccaaagagctgttccaccagcatccgcaatcaactgagtatcaattgcattggtcatgtggtgaagaccagtaataacgaacggcgcataaagggcaccaaaaacagcaccgaaaagccattttacaggacctgtcaaaccagcaagaaccactgttgaaagagcttggccaatagtccaaccaataggacctaaaacagtatgagccaaaataagggctggaatcaatgacaagaacggtacaaaaatcattgatactacttctggtacatgtttacgccagaaaatttcaagataagaaagtgacaaaccagcaagaagggcaggaataacttgcgcttgataacctatacgattaacagtaaagaatccaaaatcccaaacccaatccttagcaatttcagacgctggtgtcgatgctactgaataagcgttaagcaattgtggtgataccagacagatacccaaaacaattccaagaatttggctagtccccattttacgagaaacagaccaagtaatacctacaggcaaaaattggaaaatagcttcaccaggtaaccacaagaagtgattcactcctgaccagaactgagaaacctcggtaattgtcttaccgtcaagcattgaccaatgcacaccctcaagaacattacggaaaccaaggattaatcccccaacgataagggctggaataataggtgtaaagatctccgctaaggttgtcataacacgctgaactgggttttgattgctcttggcagctgatttagcagcttctttagaaacaccttcaatccctgatacagcagtgaaatcgttataaaagattggtacatcattaccaatgataacttggaattgacctgcattggtgaaagtccccttaacagcaggaatggcttcgattgttttcacatctgccttcttatcatcaccaagaacgaaacgcatgcgcgtcgcacagtgagtaacagcagtcacattttctttaccaccgattgcagtaagcagatcttttgcttcttgttcaaatttacccatttgaatctccttttcttttttgacaatatctatttgacttgataaactgattgtaagcgattacaaatttgtctgcaagtgttccgggatttttttaacatatttttgtaaaaaaacatcggttgtatgtttttttacctacaaatgaggagaaaaatgaaaaaatatcagattatttataaggatttagaaaaagctatccatgagcaaaagtatcaagtgggagactttctccccaccgagcaagaattggttcaatcttaccaggttagtcgagacactatacgaaaggcgttaaccttactcgttgaagaaggcttggtcaaaaagattcatggctctggctctcaggttattaaccaggaacaaatcaactttcctgtgtctgaccttactagttaccaagaactaatagaacaacaaagccttaattcgcaaaccaatgttatttctctggataaaatcattgttgattcaaaactctcagaaagaactggtctttctaatagccgacaggtctggcgtgttgttcgtcaaagagtcgttgatagctgcgcctctgttatagatattgattacctagatgccagccttgttccgcaactaaaccgtagcattgctgaatactctatttacgactacattgagaatcagctcaaccttagcatttcccacgcctttaaagaaatcactatcgataatgctaccgatcaggataagattcttatcgacctaggtaaggaccagcacgttgtctgtgtccgttcaaaagtttatttaaacaatggaaaacagttccaatttacggaaagtcgccacaaacttgaaaaattcaaattcgttgattatgccaagcgccaccattgaaagaaagggctctgctaacagaaaaagtatcggacaagaatgtccgatactttttagtttttacggataggatctgctaaatactctgcacgagcgccaccaattaacttaggacgactcgccaaagcagtcacatgggcaccacctaattctggaataatagggcgaagaggaacttggaccctcttcacatgcataccaatagaggtatccccaatatcaataccagcctgagcgacaatttcctccacctcaacaggatccttcatatagtcgaaagcagccagctgaccacttcccccagcgtgcaaggttggaagaacattaacaatttccaaatctttagccatggcgagatcacgctcaacaaccaaagcacgattcagatgttcgcagccttgaacagccaagtaaattcctttaggttccaaaacctcaagaatagttttcacaattcgttggccaatttcacggctagaggctttgccaatagtcccaccagcaacctcactggaagacaatcccaagacaaagatagctcctctcccaatagctgaacgttcaacaatatcttctacaagcacacgtgtcttctcttctaaatctagcaacatcacaacagccctcctttagacaacagctgtattcaggattcgcacaataagatagtacagaatcacaaaaaagacaaggaaaaatgcccctaataataataactgcctacggcgtttcttacttaggtcccaggagaaaccaaatcccatcaaaaaaggaccaacactataacttagcataaaccataaatctacacgtgctatatgccaaaaagaagaaataaaggccgccaaacctattaaggataaaatccaagaaaagtcccaacgatctggtttagcaaaagctaagcctattaagaagcagcccaaggcaggcatgataataaatgatagggtcataaaataaaacatgccattattatagcatgttttacagtttcatgttagtggcggttaataacaccataagcaatagtgaatgcaatagcagcaatacctacaacgattgccatgatagcccaaaaaatagtcatcgcacggcgtcccttacgattgttgaaaggaagtccccaaccaaccatgataacacctagcaatccaagccagattttataagtgataacaatcgccgaatcaaaataggcaaaagcaaccaaacctaaacctagcaaagaaatcaaataagaccacttacccttcaaaaatgaaggcaaggcccaaccaaataacactaaacctagtagagcaagagctccaccaccaaaaaatacaggtacaatataattatcaaacatattcatattatagcatatcttaaaaagttaggaaatagaatctatcaaccaaagccatatccactctttaaaatttgtttactctcaatcacagattaattggcagatactaactatttttttgagctaattaagctttgtttgcgccacatctataatcaaaacgaactgaaatttagaaatcgagggcaaatctgtggcaaaacataagaaaaaggcttgtccatattggacaaaccctttcatttcaagcttatatactctaattaagctttgtttgctgaaccgaatacgtcgatacgttcttcaacagcttctgtaatagcttcgaaacctggtttcaagaatttacgtgggtcgaagagtttcttcttgtcgtattctgcttcatttgcttcgtattcagcaacaaatttacgtgttgcgttagcaaatgcgatttgacattcagtgttaacgttaactttagcaacaccaagtttgatagctgcttggatttgatcgtcaggaatacctgatccaccgtgcaatacgattgggaagttaggaacagcttctgtcaatttttgcaagtggtcaaggtgaagtccgctccagttttctgggtaaggaccatggatgttaccgatacctgctgcaaggaagtcgataccagttgcaaccatagctttagcatcttcgattggtgccaattcaccatcaccgatgataccatcttcttcaccaccgattgtaccaacttcagcttcaactgatacaccgttagcgtgtgcaaattcaacaactttagctgctttttcaaggttttcttcaactggaaggtgtgaaccgtcaaacataactgaagtgtaacctacacggatacattccaaagcatcattgtagtgaccgtggtcaaggtgaatagcaactggtacagtaatacccattgattcaaccaattcttcgataagaactttacacaatttgtaaccacccatgtacttagctgcacccatagaagtttggataagtactggagcttgtttagcttctgctgcacgcaagatagcttgagtccactcaaggttgtttgtgttaaatccaccaactgcgtaaccattatcacgagctgcttggacaaatttttctgctgaaacgattgccattataaaggcctcctatatttttttgggtttgaacccgtttacaagtttattctatcacaattagactcaaaaaactagcttttctacaatttgtaagcgttttgattttttaatacaaaaaaaccagtcatctgactggttactctgcggaaagagggacttgaaccctcacgacctaaagcggtcacaggatccttagtcctgcgcgtctgccaattccgccatttccgctaacaacattagttattatatcaagattgacaacttgtgtcaatactttttttgaaagtttttataactttctcttgtctctttcgaaacaactactatataataccatttattgtttactgacgtcaatacttttttgcctttttttaaattttttagcaaaagttatctattatatcttttatcaaagattaacctaaactcttattcagtttatctaatttctctctaaggggagctaagtagacttcttctccaaaaccacgtgattttaagccatccactgcacaagacaacactgatcctatcaacggcaaaatcaatttaagatttgtcttcgaaatatcctttttcgaaaataaacgacgaattctaggaaaatcatagtcaaatgcttcaaaaaaaggtgagtcattcaaaatattttccagattttccaaattgactaaaagaccaaggtgaaaggctgccggagcaaaggttgatgagaaaggttgggtacaaacactgcgaaactcaatagtccctcgcgtcgttaaatcttggaattgataagaacggtgagtcttaaaatcttcctcacttggctcaatagtgactacttcgccatgaatagagtgtgctttgacagatggcgtacttagatagtctttagcacgtattggttcaaaatagtaggtttcatcaccacgcttagcagtaaaaatagctgtctcagacaagtaagaaaaatagtcatcttcgctcttaaacatcttgggaaatacccctgcattttcctcaaacacaccatgcatggaattctcccagaaaacatcacgagaaagcgctaaatcccaatcagaaccccaaaaatcagagtttgccaataaaactgccttgggtccctctatttgattaaaagcatttaagacccttaaataggacgtttttgaaacatctaactgtacctgactcccacagatgaaggaaccatattctggatagtcatgaaagaaaggatccttctttgctttagatagctcgagaaaatccataagcatctcataacgaggagatttaacaggtctgttatcattttttgcccagttcggattcactccccaaccttgcaactcatgattatgattctgcagataaggttggattataccaaggtaagtatccaaacgttcctcaacctcagagattctttcagcctttgcaaaagcaaactcaatcgtattgtaggagacttcaaaaagaatcatgtctccagaagctttatcgataagctgaataggattgttatcagaatcatacttatcagcttgaaaatcaaaattatccaagagatagagtagtaactgttttgtaagagagacatctgtagcattaccactcaaattaacaactgggtattccaactcaatccccacaaataattccggttgctccttaattggctcataatacctttgcttaagcagttccttggctgttgtcaaaataatgtccccctttttgaaataagcttatttcattatatcaaaatattcagacgatttatagcccaaaaaaacgcctgcttacgaaaaataacagtattacctttcgtaaacaagcgttacatgcttatttattcccatttttatgatgagtgttcccgctaggcgtttgcccagcggtagaccagagctagactaagaaaagctaagctattccatcatcataacactcaacaaaattgataaaaattaaacaagttcgatgattgccattggggcagcatcgccacgacgtggttctgttttaaggatacgagtgtatccaccgttacgttcagcataacgaggtgcgatttctgagaaaagtttttgaagagcagttgttgatgtatatttatcagttgcttcatcatagctttcagatgcaatttcgttacgtacaaatgcagctgcttgacgacgtgcgtgcaaatcaccacgtttaccaagagtgatcattttttcaactgttttacggatttctttagcacgtgcttcagttgtaacgattgcttcgttaatgataagatctgtagtcaaatcacgaagaaccgctttacgttgtgagcttgtgcgtccaagtttacggtaagccatgttatcctcctatattattatttatcgttttttagtccaagtccaagatcagccaacttaactttgacttcttcaagagatttacgacctaggttacggactttcatcatttcaggctcagttttttctgtcaaatcatggacggtattaataccggcacgtttcaaacagttatatgagcgtacagacaaatcaagttcttcgatggtacggtcaagcaccttttcatcgttcactttttcagtttctttcattacatcagtagctttagcaacgtcagtaaggtcagtaaacaagttcaagtgttcaatcaaaacgcgagccgagagaccgagggcatcttcagggatgattgttccgtttgtcatgatttcgattgtcaatttatcaaaaccatcgttgctacctacacgggcaggttcaacttgataattgacttttttcactggtgtgtagattgaatctacagccaatgttcccactggtgcatcatctttcttgttttcatctgctggaacataaccacggtttgtagctactgtcatagtcgctttcaaagaagcgccgtcagcgatagtgaaaagataatgatcagggttaacaatttcaatgtcgctatcagtcaagatgtctccagcagtaacttcagctggaccttggacatcaagttcaattgtcttttcgtcttcgacgtaagattttacagcaagtcctttaatattaaggatgatttgcatcacgtcttcacggacgcctggtacggtatcaaattcgtggagtactccatcaatcttaattgatgttacggcagcacctggaagtgatgacaaaagtacacgacgaagagagttacccaaagttgtaccataaccacgttctagtggttcgatgacaaatttgccgtaatctttattttcatcaatttttgttattattggtttttcaaactcaatcatttattatactccctcgaaacgaaccttgtgtactattgttattaaagattacacacgacgacgttttggaggacgacaaccattatgtggtacaggtgttacatcacggattgctgttacttcaagacctgcagcagcaagagcacggatagcagactcacgacctgaaccaggacctttaacagttacttcaactgttttaagaccatgttcttgtgcagatttagcagcagcttctgaagccatttgtgcagcaaatggtgtagatttacgagaacctttgaaaccaagagcaccagctgatgaccatgctacagcgttaccatgcacatctgtaatcataacaatagtgttattgaaagtagcgtgaatgtgagcaataccagattcgatattctttttcacacgacgtttacgtgttggtttagccaatgtttttacctcctattttattttaattattttttcttacctgcaatcgcaacagctttacctttacgagtgcgggcattgtttttagtgttttgtccacggacaggaagtccacgacggtgacggataccacggtatgaaccgatttccatcaaacgtttgatgttaaggttaacttcacgacgaaggtcaccttcaactttgattgcatccacttcgcgacggatagcgtcttcttgatcatttgtcaaatctttaacgcggatgtcttcagaaacgcctgcagcagccaagattttcttagatgttgcaagtccgataccgtatacgtaagtaagtgagattactacacgtttatcgtttggaatgtcaactccagcaatacgagccatgatttctcctttctatattatccttgacgttgtttgtgttttggatttgttggacaaattaccataacacgaccgttacgacgaataactttacagtattcgcaaattggtttaaccgatggtcttaccttcatgtttcaatccctccaattatttcgattatttaaagcggtatgtgatgcgtccacgtgtcaaatcataaggactcatttcaacagtcacacggtcaccgaccaaaatacgaatgtagtttttacggattttaccagaaactgtcgccaaaatttggtgtccattttccaattcaacagtaaacatagcattaggcatagtttctacaactttaccttcaatttcaatcacgtcttcttttgccacgcaaaagtaccccctaaaatttcgatttgatttcctctgagcacagaggtaacaattataagtcagactaaagtattataacatgcttaagtctgatacgcaagtaagattatataattatttaattgctgcaatcgcttttttaacatcagcgaatacatcgtcgatatcttggttaccttgaatatctgatacaagaccaagctcacggtaatgtgcaataattggctcaccttgagcaatattcacatccaagcggcgtttcactgtttctggtttgtcatcttcacgttggtaatagtcttcttccttgtagtcagctggtgggttgaatactttatggtaagtttcacctgtttcgcggtgaataatacgaccactcaagcgttcaagaaggcaagatggatccacttcgatattgattactccctcaagctccaaaccaagatcaaccaagatttgatccaaggcatgagcttgttcgatcgtgcgaggaaaaccatccaaaaggaatcctttttccttaatgtcgtcttgagccaaacgctctttaacgattccgtttgttacttcatctggtaccaattcacctttatcgatgaatgatttggccaatacacccatttcagtttggttagccatagcagcacggaacatatcaccagttgagatgtgagctacaccaaattcttcaacaatttttgcagcttgagtccctttaccagcacctggtagacccataattaaaagattcatcttacgaactccttatttttgttttcaaataactctatcaaggttttaaaaccttggtagagttatcaaaaaacaaaagagaagggacagaaagtaacctttctttccctctcaattgttcatgagaagacttagtcttcaagattcataaatccaacgtactgacgtttcaataggtaaccttcgagttgtttcataccttcgataccagttgaaatcaagatcaagagagatgtaccaccaagcgcgattgagcttgtaaggtgcataaactgttgagccgcaattggagccaatgaaataaatgcgagaaatacagccccgattgttgccaatctcttaagcaatgaagacatgtacttttcagtctcacgacctggacgaacactaggaatgtaagacccattcttttgaagattttcagccgttttttcaggatttacttggacaaatgtgtagaagaatgagaataagataatcaatatcgcataagtaatcattccactaggtgtattatacgagagtagtccttgtaagtgtgataaccatgtaaccttcgagaagaatggaagaatagtactaggaattgttgtaatcgagctagcaaagataacgggaataacaccagctggatttactttcaatggaaggtaagaactcgttggagccccctgaaccaatttagtatattgaattggaatttgatattctgcctgttgaacaaatgtcgtaaagaagacaatcgccaaacctaccacaattaacaaagcaactatgatatatgaacgagtcaattctcctgaacgaacattgacaaagaaatcctcgtaaatcgttgagaacatttttggaatagaagcaatgatccctgaaaagataatcattgacacaccattaccaaaacctttatctgtgatttgttcaccaagccatgtcacaattatgctaccagcagttagaattgtcccaatcaataggtaggttgaaacatttggtgttttaaccaatgaaattgatgagagagtattaaaacttgctgtaataccaatcgattgaacaaaggctaaaacaagagtaatatagcgagtcgcttggttcaatttacgacgaccaacttccccttgtttgccccactccacaaattttggatagatatccatctgcaaaagttggacaatgattgatgctgtaatgtaaggactaacccccatcgagaagatagagaagttattcatagcattaccagacaccaagttaagcatgttcaagaaaggtaaatcacttaattgtttcaaactttccgcattgataccaggaactgttacatgagtccctacacgaaaaacgaaaataatgaagattgtaaataaaatcttattacgaacgtttttgactttcaatgcgtcttttaatagtttaaagaacataatgagttacccctcattagatgacttcgattgaaccacctttagcagtgatagctgcttcagcagattttgagaatttagctgctttaacagtcaatttcttagtcaattcgccgttaccaagaactttaacgcctgatttttcagcacgaacgattccagcttctttaagaactgctggagttacttctgtaccatcttcaaagacgttcaattgatcaaggtttacaagtgcgtattctttagcgttgatgttagtgaatccgcgttttggaagacgacggaacaatggagtttgtccaccttcaaatcctggacgtacgccaccaccgctacgagctttttgacctttttgaccacggcctgaagttttaccgttaccagatgaagtaccacgacctacacggttgcggactttacgagaaccttcagcaggtttcaattcatgaagtttcattattattttctcctctttttgtaaaatgctagcgcctctaaccaagtaaggtagcttgattagaaactcgcctatacatgaaattcagtttaagtcgcaaggtaaccctcacgacttaaatcaatttttatttaacgtcttctacagttaccaagtgagatactgcgttgaccataccacggatagcagcgttgtcttctttaacaactgagctattcaatttaccaagtccaagagcaacaactgttttacgttgttctggtttgcgtccgattggagacttagtcaaagtaattttaatttgagccattgttatctcctttcttatgccaagtcagatactgaaatgccacgaagagccgcaacttcttcagcacgtttaagttgtttcaatccttcaacagtcgcacgaacgatgttgattggagtgtttgaaccgagtgatttagatgttacatcagcaacaccagccaattcgatgacggcacgaactgcaccaccagcggcaaccccagccccttcaacagctggtttcaacaatactttcgctccaccaaattctgaacgaacttcgtgaggaatagttgtaccaaccataggaacttcgataaggtttttcttagctgcttcaactgctttacggatagcttctggaacctcttgagatttaccagtaccaaatcctacgcgaccattacggtcaccaacaacaacaagagcagcaaaacgcatgttgcgtccaccttttacaactttagtaacacggttgatagcaactacgcgttcttcaagttctactgcattatctttaaatgccattattaagtgtcctccctattagaatttcaatccgttttcacgagctgagtcagccaaagctttaacacgtccgtgatagagatatccaccgcggtcaaacaccacttcagaaatacctttagctactgcgcgttcagcaacaagtttaccgacaacaacggcttgttctgttttagttcctttagaaacttctttatcaagagttgatgcacttgcgagcgttacacccgctacgtcatcaataacttgagcgtagatgcctgtattagaacggaaaatgttcaaacgtgggcgatcagcagttccagagagttttccgcgaacgcgacggtggcgtttttggcggagtttgtttttatctggtttcgaaatcacaattttcacctcttaattataatgctagctcatgagagcttttggtaaagagacaatccacaaagaattgccataaggataaaatcctattatttaccagttttaccttctttacgacgtacgtattcaccaacgtaacggatacctttacctttgtaaggttctggtgaacgaaggctacggatgtaagctgctgtttgaccaacaacttctttgttaataccacttacaacgattgaagttgcagatggtacttcaaaagtaataccttctggagcttcaacttcgtcttggtgagatttaccaactgaaagaacaagttttgttccttggagttgcgcacgatatccgacaccgcgcatttcaagttcttttttgaaaccttcagaaacaccaacaaccatgttgttcaagtttgcacgtgaagtaccgtggattgttttgttttcttttgagtcgtttggacggtgaagtgtaacttcattgccttcaactttgatttcaatgtttttgttaaactcacgagtgagttcgcctttaggtcctttaacagtaacaacattatcgttgtttgttacttcaacaccagcaggcaaagtaataactttattaccaatacgtgacatagtatttaattctcctgttagattatcaagccacaaagtgactagttttcacggggatgagtttcatagaatataatcaacgaaactcgcacaaatcatttgagataagtgcttagtaccagcttcttaccaaacgtaagcgataacttctccaccaacgttcttttgacgagcttctttatcagtcaaaagaccttctgaagtagagatgatcgcaattccaagtccgttaagaactttaggaacatcttcacgtttagagtaaacacgaagacctggtttagaaatacgtttcaagttagtgataacacgttcaccgttttgtccgtatttcaagaatacgcggatgataccttgtttgtcatcttcgataacttcaacattttttacgaaaccttcacgtttaagaatttcagcgataccttttttaatgtttgatgcaggtacttcaagtacttcgtgtttagcttggttagcgttacgaatacgtgtcaagaaatctgcaattgggtcagtcataaccattttatattttctcctcttactagtagtttgaataattcacttgctagttaatgattgagctaggctcagattgtgttaaatacattcaaattaggtgaaactaacttaaatgtaccttgtttttaccaagaagctttggtaacacctggaatttgacctttgtaagccaattcacggaagcaaacacggcaaagtttaaatttgcgataaactgagtgtggacgtccacaacgttcgcaacgagtgtaagcttgcgtagagaacttcgcagggcgtttgttcttagcaatcattgattttttagccaatttatttacctcctagattattttgcaaaaggcattccaaggcctttaagcaattcacgaccttcttcgtcagtgttagcagtagttacgataacgatatccataccacgtactttatcaacatcgtcgaagttgatttctgggaagataagttgttctttaacaccaagtgtgtagttaccacgtccatcaaatgatttagttggaacaccatggaagtcacgaacacgtggaagtgatactgataccaatttatccaagaattcgtacatgcgttcaccacgaagggtaactttagcaccgatcgctacaccttcacgaagacggaagccagcgattgatttcttagctttagtaatcaatggtttttgacctgaaataagtgccaactcagcagcagctttttcaagagttttagcgttgtttacagcttcaccaacacccatgttgataacgattttatcaacttttggcacagccataactgaagaataattgaatttttcagtcaaagctggaattacttcgttagtgtatttttctttaagacggttagccatttaatactttctcctttccttcgtgattagtcaagcacttcgcctgattttttgttgtaacgaacttttttgccgtcaacaactttgtaacctacacgtccagctacaccgttcttgtcaagaacttgaacgtttgaagcgtggattggtgcttctttttccacgatagcaccttgagggttttcagctgatggtttttggtgttttttgatgattgcaacaccttcaacaacaactttgtttacttttggaagagctttaagaactactgcttcagttcctttgtctttaccagcaataacgcgaactttatcgcctttttttacaaacatttgagtatttctcctattatttcttacgccctaaagggcaccctgaacatttcaggggactaagtttgtgttaattcagattaaagtacttctggcgccaaagatacgatacgcatgtatccaccttcacgcaattcacgtgcaacagggccaaagatacgagttccacgaggagttttgtcatcgcggatgattactgcagcgttatcatcaaacttgatgtatgaaccgtctggacggcgagcaccagtttttgtacgaacgataacagctttaacaacatcaccttttttaacagctccacctggtgtagcttgtttaacagttgcaacgataacgtcgccgatgttagcgaatttacgtcctgaaccaccaagaactttgatagtcaagatttcacgagcaccgctattatcagcaacttttaagcgactttcttgttgaatcatttcaattgtctccttttagttttattagataataacagcttcttccacaacttctacaagacggaagcgttttgtagctgaaagtgggcgagtttccatgatacgaacgatatcgccttctttagcaacgttgttttcatcatgtgctttgtattttttagaatagttgatacgtttaccatagactgggtggttacgtttagtttcaactacaactgtgattgttttatccatcttgtcagatactacgcgtccaacaagggttttacgttgattacgttccattattagaattgctcctttcccaatctattatttgatttcagattgcacagttttaacacgtgcaatttgttttttcacttcgttcaaacgggcagtttgatcaagttgacctgctgcagcttggaaacgaaggtcgaaaagttctttcttaagttcgttttcttttttagcaagctcttcttgagacaagccacgaagctcagcaacaaactttttgatttcttcaagtttcatgtcttctccttattctgcttcacgtttcacgaatttacatttaactggcaatttgtggctagcaagacgaagcgcttcacgtgcaacttcttcagaaacacctgcgatttcgaacattactttaccacgtttaactggtgctacccaaccttcaggtgcccctttaccagaacccatacgtacaccgatagctttagcagtgtatgatttgtgtgggaagatcttaatccaaaccttaccaccacgtttcatgtaacgagtcatggcaatacgagcagcctcgatttgacggtttgtaatccagtggctagttgtagcttgaagaccgtattcaccgaatgatacttctttaccacctttagcctcaccgcgcatttttccacggaattcacgacggtgtttaacacgtttaggtactaacatttgttatttgcctcctttagtgtttttacgagctggaagaacttctccacggtagatccaaactttaacaccaagtttaccgtaagttgtgtcagcttcttcccaagcgtaatcgatatcagcgcgaagtgtgtgaagtggaactgtaccttcagagtatccttctgcacgggcaatatctgcaccgttcaaacgacctgatacttgagttttgattcctttagctccagcacgcattgcacgttggatagcttgtttttgtgcacgacggaaagcaacacgttgctcaagttggcgagcaattgtttcaccaacaaggtgagcgtccaaatcaggtttcttgatttcaacgatgttgatgtgtacttgttttccagtcaatttgttaagttgagcacgaagtgcgtcaacgtttgatccacctttaccgataaccatacctggttttgcagtgtgaagtgaaacaataactttgtttacagcacgttcgatttcaatagttgaaactgaagcgtctgcaagttctttttggatgaatttgcggattgccaaatcttcgtgaaggtaatctgcgtattctttttcagcataccatttcgcatcccagtcacggatgatcccgacacgcataccaattggatgtactttttgacccacgagtttacctccttatttttctgacacaactactgttacgtgagttgtgcgtttgttgattggtgaagctgaacctttcgcacgtggacggaaacgtttcattgttggtccttcgtttgcgaatgtttcagatactaccaagttagctttttccaaaccaaagttgttttctgcgttagcgatagcagagttaagagttttctcaacaatgcgagctgctttgtttggagtgaatttcaagattgcgattgcatcagcaacgttcttaccacggataagatcaagaacaagacgtgttttacgaggtgaaacacgcactgtacgagccattgctttagctgaagtaatttctgccattgtgtcctcctcctattaacgacgtgttttcttatcgtcagctgcgtgacctttgtaagtacgagttggtgcaaattcaccaagtttgtgacctaccatgtcttcttggatgtaaacaggaacgtgtttacgtccatcataaactgcgatagtgtatccgatgaaacttgggaaaatcgttgaacgacgtgaccaagttttaattacttttttcttttcgtcatttgcttgagcttcaacttttttcatcaaatgctcatcgacgaaaggtccttttttaagactacgtcccattttgtagttttctcctttaaattaaatgtaccacagcggcttgcactaagaagtgctaccgagttggcggatgttatgtgctaagcgactaaattatttttcgttacgacgacgaacgataagtttgtcagatttagctttcttgttacgagttttaagaccaagcgcaggtttaccccatggagtagatggcgctttacgtccaactggtgctttaccttcaccaccaccgtgtgggtgatcgttagggttcattacagaaccacgaactgttgggcgaacacctttccagcgattacggccggctttaccaaggttgataagtgattgttgttcgttacctacagtaccgatagttgcacgacatgtaccaagaaccatacgaacttcgcctgattgaagacgaacaagtacgtatttaccttcttgacccaaaacttgagcagaagcaccagcggcacggataagttcagcacctttacctggttgaagctcaatgttgtggataactgtaccaactgggatgtttgcaagtggaagagcgttaccaatcttgatatccgcatctggacctgaaacgatacgttgacctacttcaagacctttaggtgcgatgatgtaagctttaaccccgtcagtgtagtgtacaagagcgatgtttgcagtacggtttggatcatactcaattgttttaacaactgcttcaacgccatctttgttacgtttgaagtcaatcaaacggtagtgacgtttgtgtccgccaccttggtgacgtacagtgatacgaccgttgttgttacgaccagctttgttcttaagagaaacaagcaatgatttttcaggagtgcttgtagtgatttctgcgaaatccaaagaagtcatgttacgacggccatttgtcgttggtttataaactttaatacccacgttaatttctcctttgattattcagcttcagctgcaaacaactcgattgctttagaatcagctgtaagagtgatgatagcttttttagtttttgaagtgaaaccagtgtaacgtccaacacgtttttgttttggtttaacagttacagtgttcacgctagcaactttaacaccttcaaatgcagcttcaactgcttgtttgatcaagagtttgtgtgcacgtgtatcaacttcgaaagtgtattttcctgcttcaagagcaaccatagatttctcagtgataacaggttttttgattacgtcatacaaattcattatgcaagaacctcctcgattgatgagatagcttctttagtaacaagaagtttatctgcgtttacgatgtcaagtacacttgcagttgcaggagttgcaacagttacgtttgcaaggttacgtgctgaaagttcagcgaatttgtttccttcttcaacgataacaagtactttagaatcgatgctaagagctgaaagaacgtttgcgaattcagcagtttttggagctgcaaatgaaagagcttcaaccgctacaaatttatcttctgcaactttagctgagtaaacagatttcaatgcaaggcgacgaactttttgaggaagtttgtatccgtaagaacgtggagttggtccgaagacaacaccaccaccacgccattgtggtgagcggatagaaccttgacgagcacgtccagttcctttttgacgccatggtttacgtccaccacctgatactgctgaacggtttttaaccgcgtgagtaccttggcgaaggctagcacgttggctgattacgacatcaaatactactgattcgtttggttcgataccgaagatagcgtcgttaagttcaactgtgctaacttctttaccagtttggtcaaatagttttacgtttgccatttttaactgatttctcctttcttattatttagcagctttaactgctgatttgatagtgataagagatttcttagcacctggtacgttacctttgataaggataacgtttttctctgggataacttgtacaacttcaaggttttgaattgtcacacggttgccacccatacgtcctgccaagtgtttgtttttgaaaacacggttaggcgcaacaggtcccattgaacctggacgacggtggtaacgagaaccgtgagccataggtccgcgtgattgaccgtggcgtttgataacaccttggaaacctttaccttttgaagtaccagttacgtcaacaacatctccagcttcgaatgtgtcaacagtgatttctgatccaacttccaagccttcaatgtttttgaattcacgaatgaagcgcttaggagctgtgttagctttcgctacgtggcctttggcaggtttgttgctcaatacttcgcgtttgtcgtcaaaaccaacttgaactgcttcgtaaccgtctgtttcaacagttttaacttgaagcacaacgtttggagtagcttcgatgacagtaacagggataaattcacctgcttcagtgaagatttgagtcattcccacttttttccctaagattccttttgtcatgagaaaatatttcctttactttattgttttttcaaaaagttttttatgagcgttttttatgctcaaaaaagtttttaacgagcgttttttatgctcagtgaatcaagctttagattaaagtttgatttctacgttcacaccacttggaagatcaagtttcatcaaagcatcaactgttttttgagttgggttgatgatgtcgataagacgtttgtgtgtacgcatttcaaattgttcgcgagaatctttatatttgtgagtcgcacgaataattgtgtagagactacgttcagttggaagtggaactggtccagcaactgtcgcacctgtgcgagttgcagtttctacgattttttcagccgctgtatcaagcgtacggtgttcgtaagctttcaaacggatacgaatttttttgtttgccattttttctcctctttcgtctatttaagataataggctagctcctcaagaaaaccaacacggattgcgtggcagtgcaaccaggcgtgtcgcaacctcttgcatcatagctaagcgctgtatttacagcaccataatataataacaaaagatcctactcattgcaagggatttttaaagtttttttcctttttctttatttccttttttgagtaaacaaaaaaatccaccttagatggattttttatcaactttcttgagtgtagtcgtaccccatgtgttcataggctttaaccgttgcaacacgtcctgttcgtgttcgcataataaatcccttttgaattagatagggttcatacatatcttctaccgtttctcgctcttcagcaatattaactgacaaggtacctagaccaactggtcccccaccatacatttcaatcatggtgcggagaattttttggtcgacataatctagtccttcatggtccacatccaacatagtcaacgccttgtctgcaatcttatcatcaatgatgccatcacccataatttgtgcatagtctctcacgcgcttaagtaggcggttagcaatacgaggcgtcccacggctacgacgtgctagctctagagcagcttcaggggttatagtcatgtcaaagatttctgaagtacgttcaataatttccttcaaatctggtagctcataatattccatatgaccattaatcccaaagcgagccctcaatggatttgacaacatacctgctcgagtagttgcacctactaatgtgaaaggtggtaactctagatggacactacgacttgtttcgcccgcaccaatcatgatatcgatgtagtaatcttccatagcactataaagaacttcttccactgccattggcatccggtgaatctcatcaataaataagatatcacctggctccaagtcattgagtatagcaactaaatcaccagccttttcaattgctggcccagacgtctgctttaaattgacgcccatctcattagctatcacaaaagccatagttgttttccccaaacctggaggaccaaacaaaagagtatgatctagggcttcatcacgaagtttagctgcctctataaaaatctttaattggtctttaaccttatcttgaccaatgtattccttaaagtactgtggacgaagggtacgctcaacatactcttcatctcctagtaaatcattatctaatattcttgccataggcttattttagcacaaaacaaaaaatgcagtcaaaatttgtccataaaaaagaagacaagacttgccttctcttttaattatttcttaccacccttaactggtgccttatcagctttctctatagcttctttaattgtcttagtatagagtttagcaccacggttaattgagtcgctatcggatccaaagtgaaccccatctgtaccattccagatagaaatattttctttagccacttgataccagtcagcaactgtcacaaagtcatatttctccgccatctctaactcatacttacgtaactgaagcaaagattgggcctcattaccagatttactaccattatatggtgtcacaaagataatatggtgacccttaggtaaattcttgatgattttattaataacgcctttatagtcgtcaatctcattaacaccaccagcaatgacaacatccttagcaagagcattactgtccgcgtaatctttaagcaaatcgttgattgttgataggttacgactgactactgcatctatagcgacattatcaatacttgattccagctgatcttttgatctaagagctacggagtcccctaaaactgtcactcccttattcacaccaaatgaagtagcctgactgttctccgcatttgtacgagttaatttcattttagtctgagcttgcgacaacccattagcttctaaatctttctcaaagttccctacagccggcgcaaagagagaaataagcactgtaattaaggtgagaccactaaatacataaagcacaatatgtcggtacggcgtcaagtctaggtctattccaaagagactggcctttcttcctgcaataaatggttctattatatagtaggaaagtgtcgcaaaaacaattgacagaatcgttgtcagaatgactgcaataacattattggtcaattgactaaagataatatatagtggccagtgaaaaagatagacactatagctgatttctgccagataactaataagagcaggctctgattttccaggcaatttctcatggaggacacgggcagagtaaatcataacagccgtgaacaaactagccaaaacaaaaccaaataggtaggtgatgcgttcctcaaaatgaaggactaagcccaacaatacgagcaaggcaaaacttcctgccatataaaggactgtctttttcagagtccaaagacgtatatttttcttgaacctagcggtcgtttcatacacacctgaaagtgtcgcaaagagcgagcctaggaagaatggataggcatgcgtaattgatgagaaatataagcgagaaaaactatcaacaaagaaagcactaataaacattgataggaagctcaccataaagcaggcaagagataccataaagactaggcctctaaattgattttggtgtttgacacgcttagctaggaaccaaagcaaggcaccccaaagaatataatagtgaacctcaatagccagactccatgtatggaggtaaatatgctggttaaactggttctcgtaatttcctccagtcagaatctcataatagttagttacaaaaccgataacagaggtaatttgacgtccaatacctgcaataaaatcatttcgaaccaagagtgccaaaggggtacagataagcaccatcaacacaagtggcggtactatccggtagaagcgtcgtcgcataaaaccaaggtaatcaatgcgatgcgtccgagatacctcatcgatcaaaagcgctgtaatcaaataccctgagaaggtaaagaagacatcaacaccgatgaagcccccaggaagaatacttgggaagaaatgatagatcagaaccaaaaatagtcctgtcacacgaatataagaaaaccagttaattctcatcctttaaaaatcccctgtttaaattttcctttgtaggtaaccttattttcagtagtcaattttccttggccatcggcttggccagacttgaactcaccttgataaatccaaccctcatgagatttgaaggttccttgaccattaaaggaaccattcttaaattctcctgtgtaggtatcaccattgtcataggtcaaagttccttgaccattcaaacggtggttctgcatctgacctttataggtaatcttagtcccatcaatcttgatagaatgttgcgtttttatagtcaccaaaaacaaggacagggcgcataaaataataacccctactgtgatacgctcaaattgatttcggtcaatatcaatatttttaaaatcaaaatcctttagttgtttaaaattcattgtctatccttaatccactgtaaccagtctcgacaacctgcagttaccaatttatatgtttcttcaaagtcacctgtgtaccatgggtctggcactccaccaggtctgaaaagcttgattttatcgtcataatgccctgcagatatctgtagaagatcctcaacatttgactcatccattcccacaactagatcaaagaactcaaaatcagcctgactaatctgctgtgagcccttggaagagtcaaaagaaatagcatatttccttaaaatcttttgggtaccttgatgaactggatttccatgctcccatgaagatgtcgcgcgactttcgatatgcaaagactctccttggtccagctctttcatcacaaattctgccattgggctacgacaaatattccccagacaaacaaatacaatcttcttcattattcacctcttgcccaaagctattaagagatatgctcacttattttctttgtcaaaattacgaacacacttttaaatcatgaaagtaggttctcattaattttcatttaatcaatccatattataccgaaaaactaatcaaatagaaaggtttctctcctaatcatatcgaaaaattagtaaccttttttaatagttgcaacattcatattaatccataagtttaaggcgtgagaaaagagaacctagtttcctagattctccttttgttggctttagatatttgaccaaacactttcaagaatgtttgtttgttcacgtcctggtcctacagagaaagtagagatacgtacacctaccaattcaccaacacgacgaacataattacgagcattttcaggaagctcatctaaactacggcaacctgtgatgtcttcttcccaacctggcaattcttcatagattggtttacagcgtttcaattgctcaagactagctgggtagtaatcaatacgctcaccatcaagatcataagctacacaaatttttacagtgtcaagacctgagagaacatcgatacagttcaagctgaggtttgtgatacctgatacacgacggctatggcgcatcaccactgagtcaaaccatcccacacgacgtggacgtccagttgttgttccatattcatgaccaacttcacggatacgttcacctacttcatcaaataactcagttgggaaaggaccatcaccaacacgactcgtataggccttacatacaccaacgaccttgttgattttagatggacctacacctgaaccgattgtaacaccacccgcaactgggtttgatgacgttacaaatgggtaagtaccttggtcaatatcaagcataaccccttgagctccttcaaagaggacacgtttgcctgcatcaagagcgtcgttcaagattacagatgtatctgtgacatattgcttaatttgttgtccataagcatagtactcttcaaaaatctcttcgaatgataattcttcagattcatacatcttactgaaaagacggtttttctcagctaagtttgttttcaaacgatcagcaaagatttctttgtccaaaaggtctgcaatacggatacctacacgcgcagccttatccatataggcaggaccaatacctttgttagttgtaccaatcttattatcacctttagcagcttcttgcagttgatcaagtttaatatggtacggcaagataacgtgcgcacggtcagaaatacgaaggctctctgttgacacaccttcggcatgaagatattccaactctttgacaagtgatttaggattgaccactacaccgttcccgataacagagattttctctgggaagaaaatacctgatggaatcaagtgcaatttaaatttcttaccatcgataacaatcgtgtgacctgcattgtctccaccttgataacgtgcgattacttcggcatcttgacttaggaaatctgtaattttccctttaccttcatcaccccactgggtacccacaacaactactgatgtcatattattttgataacggacagctccacctttacgaggctgtccccacctttcttgaaaaacttcacggtgggaatttcacccacaagtttcgcgttacagtttattatagcagaaaaaaggctatttgttcaacgttgaaagcgcttcttacgaaatattctgacagttatgtctcggtttgcgactggttgcttactgtgtattttatgtaaaactaccagctattttatgactaaataattctactagctatttaacctgcttcatataatgatttaactgcctttgattctttaaaataattgtcttgtcagaataatttttaacaactacattatattgctcgacatattttttagaacgtccgtctaataaaatccatttcacaaatgcaaaatcaaatttttcattacagtcttctgccatgctaggacgtgtctttcccctatatgttaaatagcgcctaaatgcccgatagagacaattaactctgttaaagttgaaatagacaatacagtcagcttccctcatgcgttcttcataaagacaggccgagtaattcccttcaataatccaatcacgttgtagcataaatgttgatatatcgtcagtcatttcatcaactgttcgctcttgccaatttgatgtgaaatgaattttatctaaatgaagaacctcacaattgtagtgttgacctaaaaagtttgccaaagtagactttccagagccgctatagccaatgattgcaattttcaatacaggtctcctttttcaattctgtttcctgactaatatcataacacaaagcatatatcttagaaggaattatcatttggaacaactctcgtttggacaaacaagcacgtaaagttctgtttaaagtgagttctttcttagaaaaataaaaaaaagagacctacaatcaagtctcttttcgatattaagctgccccctacagggctcgaacctgtgacccatggattaagagtccactgctctaccaactgagctaaggaggctggatgctgtattggtaccgatgatccaccgtttgtattgaacccgcgacgtaaaaaagcaggtgggcgactcgctactaacttcagttgcttctgggtgagccagcctgcacactgttaatagacctctgtctcccgataatacaaaaattagtcggtcaacacttatatgtggattcgtataccacagcaatttctatgtttttataataccacttttgaaaattattgcaagaggaaaaatcaattttattgcaatcgttttcgttgattcctctcgtattacctagataacttatcgatccgttctttattagctccaagagctctttcatatttcccggtttcattgggttggaaataattcacacctcttaatttatccggaagatattgttgtttgacccacttttcaggataagcatggggatacttgtaatcttgtgcattgcccagttccttgcttccagcatagtgtccatctctcaaatgacgaggaataggtaaattccctgattttctaaggtctgccaaggcagcatccatagccatataagccgaattcgacttaggagataaagctaagtcaacaactacattggcaatcaaaatacgcgcctctgggaaacctactttctgtgcagcttccaaagctgtaaccgtgtgaacttgcgcatcaggattagctaaaccaatatcctcgtacgcaatcacagtcaagcgtcgtgctagactagggagatctcctgcttcaaccaaacgtgctgcatagtgaagactggcattaacatcagagcctcgaatagatttttgcaaagcagaaagtacatcatagtgtccatcaccgtctttatccatggtgatatagctacgttgtaaactattttccactgtatctaaagtaatatggcgaagcccatcttctgaagctggcgtcgacatgacagctaaatctaaggaattataagccgaacgtaaatcaccattagtagccgtagcaataaaatctagagcatcctcatctaactggacatcaaagtcaaagccacgctccttgtcctctagaacacctagtatagcttccttaatatcctcgttagagagtggttccaactcaaatatttgtacacgactacggatggctggtgtgacagaaaaaaacggattctccgttgtagccccaatcatgataatattaccattctctaagagtggcaataaaaagtcttgtttagctttatccaaacgatgaatctcatctagaagcagaactaagccacctgaaaatttagcctcttccgcaatttcctgtaggcgtttcttgctatcaacagtagcattaaaggttctaaaagcaaattttgttgttcctgcaatagcactagctattgaggtcttcccgattcctggtggcccgtagagaatcattgacgacagcatattcgcttctaccatacggcgaataattttaccttcaccaaccaaatgcttctgaccaatcacctctgaaattgtacgtggacgcatgcgtagagcaagattatctggcatcttctctccttttttaactgattttttcttattataataagcatatactattttgttataaaaagaaattataaatagttcttgtcaaacctaaattcttatgatagaatgttttggtatgtggtgctagcacatccgtaataaattctacctaggaggaaaacacgaaatggctaaagtatgttactttacaggacgtaaaactgtttctggaaacaaccgttcacacgctatgaacaaaactaaacgtgccgttaaacctaaccttcaaaaagttactatccttgttgatggtaaacctaaaaaagtttgggcttcagctcgtgcgcttaaatctggtaaagttgaacgcgtttaatcttattggatattaagagagatggcttcagtcgtctctttttttgttcatcgtctttcccttttggctatacttatgttataataaagaactaacagataattcttatagaaagaaggtgtcagtatgggatttacagatgaaactgttcgtttcaacctagacgacggtagcaaagatgaaatcagtaatactttgacaaatgtttaccgttcgttggctgagaaaggttacaatcctatcaaccaaatcgtcggttatgttctgagcggtgaccctgcttatgttccgcgttataatgacgcccgtaaccagattcgtaaatacgaacgtgatgaaatcgttgaagaactcgttcgctattatcttaaaggaaatggaattgacctctaatgcgagtaatgggacttgatgttggctcaaaaacagtaggagttgcgattagtgatcccctcggttttacagcccaaggcgttgaaattattaaaattgacgaggaggctgaagagtttggtttcgaccgactaggcgagctcgttaaagaatataaggtagaaaaatttgttgttggtcttcctaaaaatatgaataacactgaaggaccacgtgttgaggcaagcaaagcctatggtgacaaaatcaaggaaatctttggaattcctgtagattaccaagacgaacgcttgacaactgttcaagccgagcgtatgttggttgaacaagcagatatcagccgtggtaaacgtaaaaaagttattgataaattagctgcccaacttattctacaaaactacctcgatcgaatgttttaagaaagtgtaatagagacctaatagtcaagtgacaatctagtaaactgccaagcaaatctactagatttcctcactattcagtgctctctacaaaaaggagaacaatatgtcacacaatcacgaccacaaccatgatcatgaagtcatcactttagtagacgaacaaggaaatgaaacactttttgaaatcttgttgactattgatggacgcgaagaatttggtaaaaactatgttcttttggtaccagctggtgctgaagaagatgctaacggagaaattgaaatccaagcatactcattcactgaaaatgaagacggtactgaaggcgaccttcaaccaatccctgaagattcagatgctgaatgggatatgattgaagaagttttcaatagcttcatcgacgaaaactaaaaatattcaatgccataggcaaagaaatgacttgttaaaaagagattgggatattgtatctcagtctcttttttagatattattttcttaaatgtaagaaattagaggaaaattgactaaatggtattatctgatatactttaaataagacaattaggggataagacccttttatttataactttccaaatgtcaacaaaggagtttaattgtgagtccatataacgaagacaatactttagattcaagtggctaccaaggttatcatcgaagccaccatcgatctcatatacaagataatcaatctgaaaagattgaagtgacaattcagggacatacagaagaatcaaattcgtctcaaatagagaaaaaaactaagatttcacttccatggaagcataaaggccatatcctgattctcagtttgattttgagtatttttagtatatcagttccctgctttacagactttgccaataatatacagtctcaaaacctttacattgcaaaaatgtttgccaatggtagcttaccctactctgacttttttgcgacaggcggcttcttttattacttactagtttctctggctttccgtttaggatcaactctttggctgattcctattcaattccttacctactatctttctggaagttacctttacaagactgtcatgcacatgacaaacaagaaggaaattgccactctaattagtattattttctatgtcactaatggaacacttggttttggtgggctctaccctatccaatttgctatgccttttgtcctaggtgctatcttcttcttaactcgttactttgcgggtcacagtcgtgatgaagcctttattctttacggcttcgctggcactgcgggagctctttttgaagctcgaactcttattttctggatattgtcacttgtgacaatcttcgtttacaaccttgtcaacaaacactttgctcgtggtttttatcaagttctttgtattatttttggtaacattctagtattgtatctatgtctttactttatcctaaatttacaaattacatcggactatattaaccaagttttggtttacaactttacacaactcgctgtagaaaaaaatgactttctacttacgttagcttaccaaagttttgctgttataggctctggattacttgttggtgcactgactacaagcaaccaccttcttggcgatgctaaagataagagcatcaagtgggtactactccttagttttatctttacagtagtttacagcttgttctctcaaagctttgggctttacagtattctcaacatcgtaccttatggtctagtcttgacagcactttctttagatgatgctattaaaaagagagcagagcgaacttctcaccgacgtcgtaatggtaaccagattcacacacttaaagtttttggtatcttccttagtcgtaattacttcttacctattgcagtctttgcatttgctttcgcgatgccaatcattatattcctatttaatttaggaaataatactgaacgtagtactgttgcaaattacctcgctaaaaatactaagaaggatgaaactatctacgtttacgattcatcagcaaaaatttatttggaaagcggtcgtaaagcagcctcacaatttgttcttccagaacttaacacagctaaatctagtcatcagaaagctctctcagatactattatccaagattcagcacaatatatcgttgtccaacaagatacacaactaccttctgatgttaaatctacactttcaaaaaactataaaaaagcccctgtaaaaggcgttgaacgatacactgtttacgtcctaaaataggtcaaaaaatcaatatatagtggttgagataaaaatataccacaatatattgatttttttttgcctagtgctataattagtagcgaggtgatttttagatgattacattagaaaaagaaaaggttacaatcaaccctgatatcaaagtcatcaaacgtgatggtcgtatggttgtctttgattcaagtaaaatatatgaggctatcctaaaagcaagtgaagctattacacctatcacacccttgattgaagcaaagttggagggaattgccaaccgtattgttgctgaaatcaatgaccgcttcactcaaaatatcaaaatatatgaaatccaaagcatagtagagcacgagttactcgaagctaacgaatatgctatcgctcaagaatatatcaactatcgtaccaaacgtgattttgagcgttctcaggctactgacatcaatttcaccattagtaaacttgttaataaagaccaggctgttgttcacgaaaatgctaataaagatagcgatctttacaatacgcaacgtgatttaaccgcaggaattgtcggaaaatctgtaggacttaagatgcttcctccacacgtagcaaatgctcatcaaaagggagatatccatttccacgatttagactacagcccttacacacctatgaccaactgttgtttgattgacttcaaaggcatgttggcaaatggttttaaaattggtaacgctgaagttgaaagtcctaaatccattcaaactgcaacagcacaaatttcacaaatcatcgcaaatgttgcctctagtcaatatggtggctgtactgcagaccgtatcgatgagtttttagctccttacgcagaacttaactacaaaaaacacttagctgatgctaaagagtgggtagctgaagaaaaacgtgaagactatgcacgcgccaaaacgcgtaaagatatctacgatgctatgcaatctcttgaatacgagattaatacgcttttcacttcgaatggacaaactccctttacctccctcggtttcggtttagggacaaactggtttgagcgtgaaatccaaaaggctatcctacaagttcgtattttaggacttggctccgagcaccgtacagccattttccctaaactcatttttaccttaaaacgtggacttaacttagagcctagctcacctaactacgatattaagcaactagctcttgaatgtgcaacaaagcgtatgtatccagatgtcttgtcatatgacaaaatcgttgaattgacaggttcctttaaggctcctatgggatgtcgttccttcctccaggggtggaaggatgaaaatggtgttgaagttaattctggacgaatgaatctgggtgttgtaacccttaatcttcctcgaattgccctagaatctaagggagaccaagataaattttgggaaatttttgaagaaagaatgggaattgccaaagatgcactcatctaccgagttgaacgggtcaaagaagctacacctgctaatgcacctattctttatcagtacggggcctttggccaacgtctaggtaaattcgataatgtagatcaactcttcaaacatcgtcgtgcaactgtatcacttggttatattgggctttatgaagtagcatccgttttttatggtagtgactgggagactaatccagaagccaaagcattcacgttagatatcgttaaatctatgaaaaatgcttgtgaaagttggtctgacgaatatgattatcatttctctgtttattcaacaccatcagagagtttgacggatcgtttctgtcgtttggatactgaaaagttcggtgtcgtgactgatatcacagataaagagtattacaccaactctttccactacgatgttcgtaaaaatccaacaccatttgaaaaattagaattcgaaaaagcttaccccgaagctggcgcaactggtggattcatccattactgcgaatatccagttctccagcaaaatccaaaggcactcgaagctgtctgggactttgcttatgaccgtgtcggttacctcggaacgaatactccaattgataaatgctacaagtgtgactttgaaggggacttcaccccaacagaacgtggattcatgtgtcctaactgtggcaacacagatcctaaaacagttgatgttgtcaaacgtacttgcggctatctaggaaatccacaggcacgcccaatggttaaaggacgccacaaagaaatctctgctcgagtcaaacacatgaacggttcaaccataaaatatgaaggtaaacacctttaataagacctagaatacattataataaactagaagcagctggatgataccttccaactgctttgcttatttcatttttagaaaggaatataatgggaaaatatcagttagattataaaggtatgcaacaagtggaacgttaccacgaaaaaaatgcaactgtaaaaaacgataaaaaagcacgtgtccaagcccttttgaaaaaagctggaaagaagaaataatatgatcttacgccgaccgagtcaaacagataaagaagctatcttagagatgatggctgaatttgaaagggagcaatctgctcatgatggtggattttggaaccccgacaattttgtttatgaagagtggctggaagaaaatattcaagcggaagcgggactcaatattcctgaaaactgggttcctgctatccagctggttagttttgacgaagcggatcatgctcttggtttcctcaaccttcgtctccgattaaatgactacttactagaaaaagggggccatattggctactctatccgtccatccgaacgaggaaagggttatgcgaaagaatcactccgtcaaggcttacaagtagctaaagacaagaatattcatcgtgctctggtcacttgtagtatcaagaatcctgctagtcgagctgttatattagccaacggtggccagttggagaacattcgccatgaaactgagcgctattggatagatttggagtagaatcatgacatggaatacaccaaaaccacaggaatggaagtctgaagaacttagccaaggacgtattattgactacaaagcttttaatttcgttgatggtgaaggcgtgcgtaactccctttacgtctctggttgcatgtttcattgcgagggatgctataacgctgccacctggtcctttaaggcaggaattccctatactaaagaacttgaagaacaaatcatgagggatctagctcaaccttacgtacaaggtctcacgctacttggtggtgaacccttcctaaacacaggaattctcattcccctagtcaaacgcattcgtgaggaactcccggaaaaagatatctggtcttggactggttatacttgggaggagttgatgcttgaaactcctgataaactagaacttcttcaactcgttgacattctcgttgacggccgctttgacatcactaaaaagaaccttatgctccagtttcgaggatcatctaatcaacgtattattgatgtcaaaaaatctcttaatcaaggagaagtcgttatttgggacaagctaaatgacggtcaaacgaactatgaacaagtcgatcgtaaagatatgctataaaaaagtctgagcttataactcagactttttatgcaattttaacaaaaactagctcattattagaggataaatcctcacgataattaaactcatcaaaagacaattttcgtaaatcattaatcgtttgacaattctcctccataacagctgtcaaaaaagcccctcttgcctttttggaaatcgtagagtgagtcttaagaaccccattgcggtcttccataaaactaaccgtgaataactgcttacgaagagttggactaaaaacatcctcgaattcacttgaaagcaaagaaacaaccggaacttgactctcctctaaaaattgatcatattcagcacgccaatagttttttaaggactgaccatcaaccttaatcttcgtatgaaagtcatgacgatgttcttgaatcgggtaaaaagcgggaatgattccataaaaagaagatgtgataaatacttgttggtctaagaattctttttcacatgtggataagtcactacgtttgatgtgacgatacatcagtccattaaaaagctcgatagccggataggttttcgcttctcccgataaaatcgcagcccagcgctgcttttctttctcagcctgctcaggctttattttataagctgtggataattcatctgtggacaattttgccatttcagttaggatagccgcactcttttcggataatttttgagacgaaacttccttactggccttcatttcttttgcggttggaattaaaaatctaatcatactgatattgtaaagtcaagcaggcatttcgtcaagaattctctccaacaaaaaagaagctaacgttcgtcaacttcctttttttgttagtcatctaaatcaacaaaacgacctagaatatgtacattttctgcgatggagacaaaggctttgggatctgcctttctcatataatgcttgaagtcagtatactcttcacgcgtaataatcgccagtaatactgctttcttttcgtgattataagtcccttccgcatcattaatcagcgttactccacggtggagtttcttctgaatcatccttacaactgggtcaggattacttgtgacaatcatagcctgcattttcttttgttttgtgaaaatcgcatctgtaactcgactagaaacaaaaatagtcaccattgaataaagagcatatttccaaccaaaaagaatgcccgcaaaaaccatgataattccattgacaatcaaggagatattaccaacatcacgacctgttttcttacgaatagtgaggctaacgatatccgtccccccactagagatacgtgattttaaaccgaaaccaatccccgtacccatgaccaaaccaccaaagatagcattgatcaaaggatcctctgtcaaggttacatgtggcatcacctgaataaaaagggagctcatcgttactgtaatgaaggtaaagattgtaaatttatggccaatcttgtaccaagccataatcaagagagggatattaatcgcatagaaagtcaatgatactggtatctcaaagcccaaagttctaacactcaatgccgataaaacctgtgccaaacctgttgctccactggagtaaacatgtccaggttgaaaaaagaaattaacggcgattgacgataagagaccataaagtaaagaagctgagactttttcagtatatttttcacgggaaatactacgtacagcctgcaaaacgcccattttcttcgcagactttttcgctacaaatttaacatgtttatgaagaggtgctttattcattttctaaatctacatgaagggcaagttcttccaactgtttatcagccacaagacttggggcctgagtcataggatctgatgccttattatttttagggaaggcaatcacttcacggatattatctttacctgcaagaagcataacaaaacggtcaagaccgatagccaaaccaccatgtggtgggaaaccatagtccatagcttcaagaaggaatccaaattgctcataggctgattcttcagagaaaccaagggctttcaacatacgttcctgtaggtctttatgattgatacgtagacttcctccaccaagctcataaccattcaagacaatatcataagctacagcacgtaccttggaaagatctccttcaagctctgctgcagaatcttctgttggcaaagtaaatgggtggtgagcagacatatagcgtccttcttcttcagaccactcaaacattggccaatcgacaacccaaaggaagttgaacttagtgttgtcaatcatgtcaagttctttagcaatttgattacgcaaagcaccaagtgtgttattagcgatttcaagtgtatctgctacaaaaagaactagatcattctcttcaaggtgtaaagcatctgtcaacttatcttcaatacttgtcaagaatttagcaactggacctgctagagctccgtcagtcatcttaacccaagcaagacctttagcgccaaattgtttggcaaactctgtcaacttgtcaatacttttacgtgagtatttgtctgcatttcctttgacaacaattgccttaacagctggcgcttcagcaaacactttgaagtctacacccttgacaacctctgtcaagtcttgtaaaagcatgtcaaagcgtgtatctggcttgtcagaaccatagttattcatggcatcatcgtaagacatgcgtgggaatggtagtgtaacttcaattcctttagtttctttcataaccttagcaatcaatccttctgtaatatcttggatttcttgctcattaaggaatgacgtttccaagtcaacttgtgtaaactcaggttgacggtctccacgcaaatcttcatcacggaaacacttaacaatttgataataacggtcaaaaccagcattcatcaataattgtttagtgatttgaggactttgcggaagagcataaaagtgaccttggctaacacggcttggaaccaagtaatcacgagcaccttctggtgtagattttgtcaacattggtgtttcaacatcgataaattccaagtcatcaagataattacggatggcgtgagttacttttgcacggagcttaaagttttccaacatctctggacgacgaagatccaaatagcggtaacgcatacgtgtatcatcactagcctcaacaccatctttgatttcaaatggtgttgttttggcagtattaaggactttaaggtcttcaactttaagttcgacagcacctgtaggcaagttatcattagcttgttcacgcgcttcaacagttcctgttacttcaataacaaattcgctacgcaagctttcagctgtttcaacaacattagcatccgcattttcagggttaacaaccaactgcatcaaaccttcacggtcacgaagatcgatgaaaatcaaacctccgaggttacgacggcgagatacccaacctttcaaagtaatagtagttccgatgtgttcactacgaacacgtccggcatacatagaacgttccataaatacacttctttcgttaattttttagtcttaactattatagcaaaaagcccatcaaaaccccacccatttcaggttagaattttaatagactttcttttttataaaactatttgccaaattgtttcaacaaatcactagtatccacgtaatcctcagcaaactcttcaaaatcttcaaaacgataatcggctgtttctaagtcaagtaaactattccaacggaatccgtaaacatcttcaatgataacactaagttcatcagtttcctcgtctacctgccatcccaaataacgttcctgggtttcaaaactcaagaccacatcttgacaatcctgacgccaaacttgaccaagtaattgctgacacatcgcatgatcacttgcaggctcatcattaaaccaagtaatatcatgtttatcaagaaaggcaatcaactgccaaaactgttgttggaaacgaatgggcatactgcgatcaaaagccaaactgaacttttcactccgtttgagcatatcaactatactaaccatacgccccctacttttctaactgttcgaggactgcagcaaagtttttagttagctcttcgaaacttacagtaacttcctcacgagtagcattatttttgacattaacctgacctgactccacttcactctcacctaatgtgataaccgtcttggccttgaaggtatctgctgacttaaattgtgccttaatcttacgtccaagataatcacgttcagccttaaatccttgatagcggatagcttgaactaactcaagagctttgccattggcacctgaaccaagtactgcaatgtaaacatccagattttcttccaccggaagctcaataccttgtttatcaagaaccaaaagcaagcgttctaaaccaagtccaaaaccaaaaccagctgtttctggaccaccgaagtattcaaccaaactatcgtaacgaccgcctgcacaaattgtcaattcagacttatcaatagtggtaataaattcaaaaatcgtgtggttgtagtaatcaagaccacgtaccatattagtatcaatcacgtaaggaatgttaagactatcaagcatggtacgtacttcgtcaaagtgcgcttgactttcttcatctaaataatcaaggatagatggagcattttcaacggcaaccttatcttctttttcttttgaatcgagtactcgcaaaggattttcatccaaacgacgttgactatcttttgacaaactttcacgcattggtgtcaaatagtcaatcaaggcctgacgataagccagacgactctcagtatttccaaggctattcaaatgaagggtaacatccttaatgccaagcgtattaaagagttggtaggccatagcaatggtttcaacatctgttgcaggattttttgatccaaagcactctacacctagttggtggaactcgcgcaagcgtcctgcttgaggacgttcataacggaacattgatccaatataataaactttaacaggtttttggacctctggcgcaaagagtttgttttctacataagagcgtacaaccggtgctgttccttctggacgaagtgtaatatgacggtctcccttatcatgaaaatcatacatttccttagtaacgatgtcagttgtatcacctactgaacgtgaaatgacctcgtaatgttcaaacataggtgtacgaatttcaccataattgtatttcttaaatgtttcacgtgcaacattttctacgtactgccatttggcactatccgcaggtaaaatatcctgcgttcccttaggtttttgaagtttcataatgatgatacaggcctcagatagacctgccctccttttccgttattacagatataatcactctattctatcataatttatatagcttttgggaaatggtggaggatttttcaacgtcagaaagaaacagacctctcggcctgccacaatcattaatcttccttataaagaatgaaggtcacaatgaaagataccacaacagaaattacaagacctgcaatagctgtgtaaaaatatttaagtgtatcttcaccaatatacgcagcaatcgtcaagagacctggggaaccacccgcaaaatttctcgcacctaaaataccaaggaagaagccacctactcccccggcaacaatagatcctataagggctgctttattttgtaaagttaccccataaagagccggttccgtaattccacaaatcgcagtaatcccagcagatgaagccagagcttttttattggtatccttagtttttaaagcaatagcaagggctgctccaccctgagccacatttgaagccaaagcacctggctgtgcaatcgtatcataaccaatagtcatacggttattgattccaatggatactaagccatagtgagttcctgttgtaaccattaacgggaaggttgctcctacaattgtcggaacaacccatgggccaaagttttccaaccacttaaagaagtcacccaaccagttaccaatgacagcaccaattggacctaaaatctaaagtgttacgattgcagtaattaaggtcgtaatcataggaaccaagaaaaacttcacagcttttggtgaaattttaatcgcaaagcgctccacgtaactcataaaccaaactgccaaaataacagggataaccgttgatgagtaagaagttaatgtaagaggaatactaaagaaagagacgccatgacctgattccttggcagttgtcacaatctgagtaaaagttgggtgtaataaaatagcaccaatcaacatccccaattgagcattcgtcttaaactgtcgagctgctgaggcacctaaaaatacaggtaagaaataaaatccagcatcgccaataaaattaagaacttgatagttaacatcatctacagctactaccttaaagacaaccaaaagggacaaaacggccttgatcatccctgctgctgtaattactggtaagattggggtgaaaatcccagaaataagagctaaaaagctttgaagaggagttctatcttgtttttccgatgattccttagatacttcatccagatccaataaaccttctaaagcgcggtatacatttggtacatcactcccaacaacaacttgatactggccaccactcttagccaaactcaccacaccatcgatagctttaacagcctcatcatcagctttagaatcatctgctaaggtaaaacgtaaacgtgtagcacagtgtgttagattctgaacgttctcctttcctcctacagcttctaaaatcttctgacctgtctctttataattcatgacacttcctttctatattcataaaaagagagaacaggctgagcccgtcctctgcattttttctattatgaccaaactttatcagtaattgttttaatcaatttcaatttattccactcatcttgctcagtcaagatattaccttcttcagttgaggcaaaaccacattgagttgagataccaaggttcttaagtggtacaagttcagccgcttcatggatacgagcaataacagcatctacatcttccaaagctggatccttagaagtaatcacaccaagtaccaattcaacatgatcacggttattccaaatcgttggaagtggtgcgaagctacctgaacgcgcatcatcgtattccaagaagaagatatcatagttcaattgaccaagatatttagcgactgaatcatagccaccttcaaaaagataagttgacttaaagttcccacgacaaatgtgagtagccaaagtcaaatcttctggaagaccttccaaagctttattgatagtatatacatcatcctcagcaatttttgccaactcagctgttttctcaggattatttttttcattctcaaactgttgaatcaaataaccccaagtcgtatcatccaattgtacataacgtgcacccaaatcgtagaaatgttggatggtatcatggtaagctttagccaaatcatcaaggaaatctgtccatgaatcatagtaatcagcataaagatcactacggtggtcacggttaatgatgagtgatggacttggaatagttacttttggagtaattccttcaggagtcactgatttaagatattcaaagtcacgatagaaaggatgattaggattttcagcaattttaccattgatacgaacgttagttgtacgtgtcttagctccatggaatttatatgaatcctcttgttggtaagcttcaaaaccagttaggttccataggaagtcaaggtgccaccaagaacgaccaaattcaccatcagaaacgacttgaaggccattttctacctcatgatgaaccaattccttaaccaattcatcttgtactttcaacaattcctcttgcgaaatctcaccattggcaaatttttcacgtgcttcttttaaagcttgtggacgaaggtaagaaccaacatgatcaaaatgataatgaactttactcatagttatttactcctttttattctttcatttaatgtaataataagcctattctagcacttgctgttatagctgtgaaatatgtatttactatcaaattgtatagtttttaactatatgttttcttgagaagttttttgtcaagtaactttactttacaaaaaagatatgttattctgttatagttgatttaaaatcaagaacataaatattaattcggaggaaataaagaaatggcagtacctgcacgtcacacttcaaaagcgaagaaaaacaaacgtcgtacacactacaaattgactgctccatcagtacaatttgacgaaacaactggagattactcacgttcacaccgtgtatcacttaaaggatactacaaaggacgtaaaatcgctaaagctaacgcagctaaataatagaagggagataccatgcgcgtaaatattacacttgaacacaaagaatctggtgaacgcttgtaccttacttcaaaaaacaaacgtaacactccagaccgtcttcaattgaaaaaatactcaccaaaattgcgtaaacacgtaatctttactgaggtaaaataaggattcaatacgaatcaatacaaaagaaaaacgctgatttcaagcgttttttctttttgtcaattgcagtttattgcactgtatttcaattcaaactctacctttttctctacctttttatcgtaaaatctgattggacacggtttgtgtccaagttatttataaatagctttatatcaacctttagcaaggttgtacaacttattcataaaaaataaatagatctgattgaagacaaagtcctcagaagttatacttctggggacttttcttgcttcgaaggagtataataaaagaaaaggtatttgatgaggtactcctatgtttcacaaagataatcctgaatataatcgtcgtcaaataggtttctatacacttgatgaacttgtgcctaaagaccattttctaagaaaagttgaagaaacgattgatttttcttttatttatgatgttgttgaggatagttattcttcagataatggtcgccctagtctagcccctgttttgttagttaagattcctttgattcaatgtttttatggcattcgttctatgcaccaaaccatcaagaatatcgaggtgaatacggcttatcgttggtttcttggcttatctctggatgataaggtaccacattttacaacttacggtaagaactatagctgacgctttcaaaataaagaattgttagcacacatttttagtcatgtgcttcatcacgttttggaggcggggctcattgatccctcagaaatcttcatcgatgggacacatatcaaggcagctgctaataatcataagtacaaaaatgttgttgttgatcaaaaagctaaattcatgagtgaacaactggatgttgagattaatttagacaggaagaagcatgcaaaaaagttcttaaagcccgccaaaaaaggcgaagctaaatctaagaaacaatcaacgactgatccagatagtggttggtttcacaagggagaacacaaggaagtcttcgcttataatgctcaggtagcttgtgataaacatggttgggccttggcttatacagttgaagcaggtaacatccatgatagtcaggcctttcctgttcttttcgccaagttagaacccttctcccctgaattcattattgcggattcaggctacaaaacacctagtattgccaagtttcttttagaaaaagagattacgccagtattcccttacactaggccaagagtaagagaggctttctacgtcctaaagactttgtctatgacgagcattttgactgctatctttgtccagagaaccaggtattaacttaccgtacaacgacacgtgaaggttatagagaatataaaagtaatcccgaaatttgtaagacctgtcccttgttagcgatttgtactgaaagtcgccagcaccaaaaagttgttgtgcgtcatatttggaaagatgccttagaaatctgtgaagatatccgtcatcaaagtgggatgaaggaacggtaccaacaccggaaagaaacgatagaacgtttattcggaacagctaaagaatatcataacttgcgttataccagagaaaaaggaaagtccaaaatggaagataaggttgggcttactttggcatgtctaaatatcaaaaaattggtaaaaatgatggtagggaagacctgttattttatccaaatacctcaatattattggattatgggagaattaagtgtgaatataaagtcaaaaccacccgtgagaacgggtggcttgctcttcggctgaaagcctctgctaccggccgaggcctaaaggcctaccgaatgcttccccttcagcaccacctttgctagctgacccgtctagcgggtctctttaagattattttcttttattcttctcacctgtaaacggatcatactcctcaaacagactaagctgatctgctaccacgtcttcttgtaattaattacgaatatattcttcaattcgcttctggtttcgtccaaccgtatcaacataaaaccctcgacaccaaaatttacgattcccatatttatactttaaatttgcgtgtcgatcaaatatcattaagctacttttgccctttaaatatcccataaatgaggaaatacttagcttcggtggtatactcactaacatgtgaatatgatctgggcaagcttctgcttcatgaatttcaacaccttttctttcacataataatcgtaagatttgaccaatacttgctttgtatttcccatagattatctgacgtcgatatttgggtgcgaacacaacatgatacttacaattccatgtagtatgtgctaaactattattatcctgtctcatcagggggcctccttttgtatattagttagtggtcgggaaaccttatctaatataacactttagggggacttttttgatacatcgctaaaagcttttcggaaccactagcacagctagtggttttcgtaagacaaaaagacaaacatcaaaaacgatgtttgtcttcattctgaatcagaattttaataggaattctgatttttttatgcaaatccatttaaaagccaaagggtgtttaattattatttattaaaatatagataaatatcatttgattagtatttgttaagtaggagtgcttaattcaaacgacctcattataatgcttatcacatacattaaaataataaaaaattgaaagaaggttgaaaaataaaaataacatgctataattatagcgtctatatgaatagggaacatgggtagtagtaactcgaagccaacctgtttgtaatattttgactcttttggggagagttgaatgattacttgttggtacttggtgctatgtgatatggtattgggatagggttatcataccgatgttttgatttgtaagatggggatagagcgtaagtaaaggggacgctctttaaaatggggagaagtttttatgaaatatatgtaaattagcaatactgctggattcaaaaacacttttattagcaaagcgttttttctcctgcagtttttttatttattaaatagtgtatttttaaattcgggggagaagactagaaaatctcaaaacaattgatatccttggatgatatgacttagttttcttgtcttacttcttgaattttatacgtaatgatagtctttttattgagacctttttctttatctactttacatcatttgcaaaacaagaccaatagcgagggcattccctttaatgcttttggagaaaggataactcattttcctttttattggggataataaagtgataatgtagagtcttatttgtcaatattatattgatttcgtataggtcatagggggggatcttatgggaaaattaaatattatggttgtctttgggacaagaccagaggcaattaagatggcgccgttaattcttgagttgaaaaaaacatcaagaaaccattaatactattacagtagtcacagctcaacaccgtcaaatgcttgaccaggttttggagacttttgaaatagttcctgattatgatttggatatcatgggaaaaaaatcaatcacttcaggaaattacttctaaaattttggctaattttgatccagttgttaagaaagaacaacctgatttggttttagttcatagtgatactacaacaacttttgctgctggattggttgcattttacaataaagtaagtattggtcacgttgaggctgggcttagaacttatgacaaatattcaccatatccagaggaaatgaatcgtcaggtgacggttgtgactaattctatccatcatgctgttaagctggtagatctcggtattagtactaggattattggtggtaaggttaaacattcaacagatgcctctattggaagtacagctctggaacaaatcagacaactgaattttgattgtgctttcattggtgctaatggagttgatgccaattatttcacaacgccagatatggaagaggcggtcattaaacgaacagtgatagctaatgcgcaaaaagcctatgttctagctgatgcttctaaactttctcaacctatgctaaggtagccgaggttgagaaagtaaccataatcacaaatgcttcggaagaagggctccttaaataattaaaagagaaaacgagggttattgaagtatgatttatactgtgacgctaaacccatcaatcgacttcattgttcgtatcgacaaggtagagattggtgaagttaaccgtatagagagtgatgataaattcgctggcggtaagggtattaatgtcagccgtattctacaacgtttaggaattgacaatactgctacgggcttcatcggtggttttacaggacgttttgttacagacagtttggatgctgaaggtattaaaactacttagaatggtgagactgtaatggtattaggaaaagtaagtgattttttaatcaagcatcaaagattgttaacatacttaagtatttttgctgcgttaatgttattaatgcgcttagtgtatgatgatgttttgattgaccatgataatcccatcgttttagcaatctttataggaatactagttctttggaccctagcatcttaccttaatcgaagacagcatatgctatcccactttatcttacagagttcgaaacttattaacgtctatgctgtagacttagattatcgttttattgcggttaataagaatgatattcggctcatggaagaaatcttttatttcactcccaaaattggtgactttccaatgaattatcttaatagtgaagatgctgcgcgtttaaaagcaaatgttgatcgtgcgaaaaagggtgaaacatttatatttatggatactattaagacaggcgacaaaacgctttactggcaaaatatgtattctcccatttataacaatcgccaaaaagtgattggtgttttttgttttgttcttgatgttacagagcagagacttcatgaacttgaaatacagaggatggcatacgaagatgttttaacacgggttcataatcgacgatatattgagcttgcttttgaggaatgtctgacacgtaaagaagaacaaattacggttattatatctgatttggataaattcaaggaagcaaatgatacctttggacatgctacgggagataagattctaattgaatttggtgatattttaacgaagataatgcctgaaagtgctgtaatagcaaggttaggtggagatgaatttgcggttttactccctggagtttctgaaaatcaagctgaatttttaataaaacttgttcaagcagaaatgactctcaaagatatggggattacagcatctttaggtgcttatacggactcttatcaatcacataaaaacttcgttgacttttttgcaatagctgataagaaaatgtacgaaaataaaagtcagaaaggaaaatcaaatgtttgacattattctagtcgatgacggtagtggagctgattttgcaccgttatttgcaatagctgataagaaaatgtacgaaaataaaagtcagaaaggagaacgtcgatgatgtttcaagatgttgttattgtcattcctgcctatgaacctgatgaccgtttgttggaacttttgaaaaatattcgggataaggaaaatcaaatgtttgacattattctagtcgatgacggtagtggagctgattttgcaccgttatttgcaatagcgcagagtgactatgcatgtcatttgcaaagacatgatgataataaaggaaaaggtcgtgctttaaaaacggctatttcatatattttggaaaattttcctaatgccaaaggaattgtgacgattgattctgatggtcaacatacctacgaagacatgatgaaatgtttggctgaatttttgcaacatcctgatagtttggtgctgggtgttagaacatttgaaaaatctgttcctttacgtagtaaatttggaaatttattgacaagagacgtcttgggggctatgacaggtatgaacgtttctgatacgcaaacggggcttcgtgtgattcctatgtcatggttgccaaaactcttaaccgtggagggtgaacggtatgaatttgagatgaatatgttacttgaggcaaaagaggacaatattctgatttgtgaagttggcattgcaacgatttatttggatgaaaatcagtcgtcgcattttgatgcgattcgtgactcgattagaatttacaaggttttcttcaagtacattttttcagcattgttttccttcttggttgatattgttgcttttacgattttaatttctttgtttaatggattgagttttagtgcggtgacgttagcttcgattttagcgcgtgcgatatcatctgttgttaatttcaccttgaatcataaggtggtctttaaacgaggtcaatcaaatagtgcgataaaatacttcactttggtggtagtacagattgttttgtcaagtttattggtaacagttctaggaaatgccttgacgacgctgccaatttcattggtgaagattttagttgacggtacacttttctttgtcagttattttgtgcaaaaacatttgatttttagtggaggagagaatgaaggctaataagaggatactctatttcgttgcatttgtaacgactgccttttatttaacttggcgtttggtggcgactattccgtggcatgattcatggtttgcgctgatctttgggattttattgtggggaagtgaggtagtttcagccattacaggctacattctcatttggaataagcaaaaggactttgaacttgaaaagcctgagattgctaaggagcgttacccagatgtggatgttttgattgcaacacataatgaggatccagagttgctttataagacgattaatgcctgtacttttatggaatatcctgataagtctaaggtgcatatctacgtctgtgatgataccaatcgtctagaagttgccaaattggctgatgagcttggtgttggttattttggtttggcggataataaagatgccaaatcaggaaactacaataatgctttacgtcagacgtcatcacctttggtggcgacatttgatgcggatatgattccttatcgggaattcctgttggaaactgtgccttattttgttgaacaagttgaggcttatgaaaatggtgacgattatgataagtcaaaagttggtttgattcaaacgccacaaagtttttacaatgctgatattttccaatttaacttgttttcagaatcaaccttaccaaacgaacaagatttcttttccaaagaaattaatgtttgcaataattcgcacggtgcagcggtttatacggggtctaatacgcttattttccgcaaggcgattgaagatgttggtggttttccgacagataccattacggaggatttcgagctaggtgttcggatgaatgcggctggttatgtaaattattcgacgaaaagtccaatggctagcgggttaacgccaacagatttgaagagtgtcctcaaacagcgcgcgcgctggggacgtggcgttattcgcagtagctacaatatgaatatcttctttaatcccaaattgacaaaggggcaaagaattgtttatattaatggctatctttattggtggtctttctttagacggttattgtatatcttggcaccgattttatatacggttttccatgtgcgtgtggtggtgtcaaatatctggctactgttcctattctggttgccaagttacgcattgacacacttgtcaatgcgagaagtctcaaaacaataccgaacacaggtttggggagaaattgtggaaacgatttttgctccgtatttgtttattcccatgatgttggagtcctttggcattagcgataaaaaatttaaggtgacacgtaagggaaatgatacgtcgtggacgttgtacctttatgcgcttccttatcttgttttatggggattagccgtttatggtttggtgacttttaactatggaaaatttggttcagagcttttttatggaagtattatcagtttttggttgacttatcatatcatcaatttgacctttgcgattttctgtgcgcttggtcgtccgatttatcgctcaagtgagcgttttactgttgatgaagctatggttattgaggttgatgatgattcttaccaagtgagagtctgtgatatttcagaaacggggatttcattctatacggatttaccattgtatttgccgaaagaaaaagaactgacgcttaatttgcaatcacgtgattaccatgcgagggtaaaaggtcatgttgttcgtgtttttgcgattgataatggttggcgctacggcgttcaattttcagaaattcctgaagctgataagcgcgaattttatcagtacatttatgaccgcattaatcacaatcttccgaaggaaaaagacccttggatgacaacatgggatgatttatttgagaactttagtcaacgtttccaaaataatgaacgtcctgtttcagcctatgaccaagtagcttttccgaaagttcgtgttaatgaagaggttcaggttgctggaaaaaaatgccagcttagaaagacagattattattacatgacattttctggaaaattgacaaatcctaaaaaaggaccgaatgtcgcatttacctacaaagatttgccaattcagttgacttttgtgtcctatgatattgatagagacgaatcgctttatcgagttaccaatttagcggatttggatagcttacctgcttttaaagccttagcaaatgaatggagagggagagtatgattagtattgctagattactgttgttctttgtgattaccatggggtacaatgcctttttccgtaatactgtgaagatgaatcgcagtctgacatgggtgtttacattttcagtcattacattggtattgtaccttggtagtttgttaggctttatgttgcagaccgtgtatgtcatttctgttttgggctgtcttttgagtctttattatctttgggcggtatggaaaaagaaatatcgctttgggagacttgattatattgcgcttggaatgatggcttatttgcttttgtttggaataacgctctggcattcaccgcttttacattatgataattttacgcattgggcaacgattgtaaaatttttccatatcaataatgctttgccaacacagcaggatacgattattagttattatacctatcctgttggaagttcacttttcatttattttttcacgactatcgtaggctattcagaaggtagtatgttggtcgggcaattcttcttgattgcttccagtctttatgccatgtttgcggcacttcgtgatgatcgacgtgtcttaatggttagcatgatttttgcttcgtttgctgtttttaatacgttcaacgttgctattcgattaaataatttgctggttgattttctgcttccggccttggccttggcagccatagcaggttgttttgtctatcgtaatcgtttctggtttttgtcgctaaatacggcggtaattcttggattattaagtatcgtcaaagtaagtggacttttctttgtcgctctcgttttagtagtttatgtggtttgtattgtgcgtttacttgttcgtaaaagagcacgtttaaaagcactagtgctgctcataatgaccttgctagtcagctgtcttccttttgttatttggcaaaagcatgtgacggataatttcccaaatgcctcaagtgccaagcatgcggtgtccatgtcagaacttggtcaggtattgactggaaatctgtcaggcgacccacaaaaaattatcactctttttgtcaaatcggtgtttacgtttgacagtttggcaagcaatggaattttgataatcaatctgattatgctgattgcctttattgtgattggcattcgtttgaaatataagaaatttgtcttgttgacttggggatttgttgatatttcgattgtgacttactatattggcattttactcatgtatctgacagcaatgccgactgatgaagcgttagaattagcaggatttgagcgctatgcttcgagcatcgttatctttgcttttggttgtttgaccatggctttagcatgggtaatggacaagtgtctgtatgaaaaaatcattagtaaacgtaatgctaggtcttacaagagcttatttaataaacacttgtaccaatacgcgagccttgttttgacagtttatgccattggaatgttcttgtcagaaaataatagcattgtttacaataacaatcaggaaacaaacgaggtcgtaaaagaaattcatcagtttactggaagtcagagtaattcgtcaacggatagaattttggttgtaacagcagataaggagaatgtagataattattttgtccaatatgctagtcgttattatctgtgggatgtcaatgttgatgccagagaaaattttgtgacggctgaccaagaatttttagatttaatggcatcatacagcgacagcgcaacaagttattacctcggcaatgaaaatatcgatactatagatggttccaatttaacagacgatgactttattgcactcttaaaaacgtatgacgaagtcttgattttagatgaccattatacgtttaatgccttgacgaaaaaactatttggtcggacatattccccaggattgtataaagtatcagatattcttgctggaaaagggtaagttttctagctttatcaagcataagtcttgatatttcaaataaaatattctattataacaaaaaatatgtagaaggaggcggagtttgtgacttcgcctcttgtagtgctcaaaagactttcttgaacattggagaggaagctaagataagtccgtttgaattatctgctctactcatcacacaaagcgaggtccttaaaagatacaatccacgttctacacactcaacactagcatagaaagatctcatatccgcaaaagcaatatcagattttggttcccgtgaacaatcaaaatagcccattatctatctattttatagttgttttcccaatattccctttcaccttttcctatgccttctggtaattgcttcaaacattgtcccatactttgatatttaacaatttcagttatttcagccaaagaaagtcgatgagatgctctgctaaagtccgtatcgaagtaatcaacctcttctatttcaactaaaatctcataattttgaccaagataatatttaatttcagacggtactaacttctctgattcttactgaagtaaaataattgaattaaaaaccatgaaaataagattttcatggtttttctattactcaaagaggatctcctatgacaaaattagaaacatttagatggcgtatgtggcatgtttatctccttatttttataaccattctacttacaggtacattcgttcgctatggttatagacttcaagccgcttattccttagacgatagactttacgactatactaacaaaaaagttactgtaacatcctttcaaaacgtcaaaattggaaactttaacgttttaggtgttaagtttggaaatgaaaaagcactggagagaagtcaattagtcgtcggtcgcacctatctagccttcaaagaatctaggtataaagcatctaaacacaagaaggaccctaaaaattatgatattattcacttttatcagcttggtaaagatactggaaaaggatacactattaatgtactagaccttgctaagaaactaggatatgatgatcccggttccatggataataccatgttctccgatggtaggaatgagtttgtgaaattttcctcctatgacaacgaaaaagaattctatgtcaatttacgcacccataaggcaactaaaaccaaaccagcaaaagtcagtcaatactacggatttgctaaaccttaccgctatctcctttcaaaggataatttttctataggtcataaagatgatcccctcactatcaactccatgccccttatctggaccaaagaaagaaattttgctgattacaaagatcaagacgataacgaatacagtgaccaatcgctcaaaaaaagattcagcctaattatcgtaacaactgattcacttaatttggatgatgccattaaactccaaaaagagttaacaccagataaggaggatatctattggtattttacaagtactgatacaacgactggacaccctgagcaagttaaaagtcaaaaagattacaacctactagttaaggagagtcataactaatatggtaaaaaataacttcaaataccttaaaattactatacccttgattttattattgaccatgattgctatctttttctattacaatgctcaagaaaatattaaagggttttataaaactcgtggatttcaaggaaaggtgcaaataactggtatcggatgggcagataaaattacttatcgtatgaataaagaagatgaggttaaacattacctgattttccatattgattatcaagagaccattaataacaaaaaagaacatgtaaatactcaactgcctctccatattcaagatttactctatcctcacattgctagcccaacagaaagcgactcagattttagtcgccaaaatagtgaatataagattttacctgatgaaagagaatatggggacgactttgttaaaaagtctattaaaatcaaccctagaaatcaaaaatttatcaatgatatctctaaagctctaagatccgagaaagatttaaaaaatattattgttcagatagaacctgtaccatacacgacactctatacttatgagaggggacattctaaagcgctaggtggctattatgatttttcacttaaagatactctacgaaacaaacaacttactgtccaattgagttttccttctggttccacgactaaagaaattgacttacattctcaattagaacaggtacttaaaaactctgaactaccagatggatggtatatcttaaatcaaaataacgactttccaaaagaggtacatattgatgacaatcaaattagaattaactgaagaaagaactcaaagagaattatctgaggaagaatgggctttccctatttggagatgggcggctttctcactatttgacaccctaatactagttagtcccttgacaagagaattgatttatcctggagggagtgattctcgtttttacctaggtaaatcattgggtaacttgatgctagatgatacacaacgcttcatctttattattatcattctaactctattgctacctgcttttgccttaatcatagaaagcctattattttcaaaagggtatcctctactttcaataatatgtagctgtctaatttttgttagtgcaacagtcctatttgtctatagtctcagtattgtcccagatttttggagctttacaatttatagttatatgctttaccttctcttcaacataggtatctccctcagaaaaatcaatagaatcatcaatcttaggcagaataataccaaagcataagagcctctatccacatagtactccccttttagtataggaatgacacaaacgaaacaaaaagtcattgtccactatggagttgaccacctagctaaaagcttccatattaattttgaaaatcattttaggaatactctagactcatgtcccagaaataaatttcactcctttggtagcaaataaacaatgtaattcatagtaaaaaagatcaacacattattgttgatcttttattttcactctaaatctttcagaatatctgtaaacctatgtgtaaacatagctgtcatcccccatatattttctgtcaagtttctgtaaaaaggaatatgacgttcactatacccaaaattgtatttttctctgttttttactaggaaaaatgggaaatcttttgcatcactcaaggtagaagtcactttataataaatcggattctctgtcaataacgtgtcaacataaactgtaaacaaccgtttcacctcttcatttggatgaatatcctcccaattttctatatttatctttccaacaaagcaatggatggttctcccctgatgaatcagataatcaatctctccccaaatgtcaatttgatcaggagttaagtttagttcctcacaagtttctcgtatagcagcttcttgaaaagtctcaccgtcttcgacacgcccacctggaaaagagacctcacccggttgagaaatatgctcacttcgtacttggtaaaggatttgatacttatcagtttttacatcatatatcaagggtaagagcactgcatagcgtcctttctcccctagtggcttcggctcgtaatgagctagtttatctttaatagtcataagaactccttgacttcatattatcataaaaaagaagttatccctattatataaaatttttatatataaaatattgacatatctttctaaaagagatacactcaatgtgtaaaataattatatataatttttatacatatctaaaaacaaaggagcacactatgtattttccaacatcgtcaatcctgatagagttcctaatactagctattatcgatagagaagactcttatggctatgagattagtcaaaccataaagcttgtggctaatatcaaggagtcaacactttatcctattctaaaaaagcttgaaaaagcaggctatatgaccacctatagccaagcatatcaagggcgtaaacgtaaatattacagtattacccaagagggaaaaaatcatcttcaatttcttaatgaagaatggttaacctataaagaaaccctcgatggtattgtagaagggagattaagacatgacaaggactgaatatatagccaaattaacaaaatatctacgaaaattaccacaaaaggactatgaagaggccctcgaatatttcatggaatattttgaagaggctggacctgaaaatgaagctcaggttattgcagaattaggtacacctaaggaagcagcacatgaagtcattagtcgtcttctagacgaaaagattattgaggataagagtagcttacgtaataaaacaactatcctctggattgcgattctagctgttttagccagtccagtcgccttaccaattctactactcttcctagctatgctattgacacttcttttgattatttttgcagttatagtgactgccttagctcttacctttgccttgctcattagtggtgtttacactttctttacaagcttctctctcttaaatgtttcactagcttcaacactgtttggaggaggtctaggtctattgatgtttggaggagcactcctactacttttgatttcatttgaaatctgtaaacttattgtaaagctaattaccctattgattaaatggctcatcaagaaaggaagaaaatcatgaaaacttggaaaaagattatcctcggagtgtctcttatctctctatttttaggaggaggattagtagcttggggttatagtcaaggtggcttgacagatttacaaaatcaaactaaaagtgagcaagattatgtcaagaaagaagttgagaacttcaataaaattgatattaaaagtagtagctacaatgtgcttataaaaaatggtgacgttgacaaagcaacgctttcttactaccaaaaaacaaaaaatccaattgacacatctgtaaaggatggtcaattgactatcaatgatagcaactctgaattagattcaacttctaacaaacatattaactttttcggattaaaagatttagtaaggctttctactctcaacgaggaagtcagaaataaaaccattgtcattacactccctaaaaaacaaacgattgattttttaaaggttgatttagcaactggaaatctagatttaagtaatagcaccatcaaacaagcagatatcaatctaaatgtaggggacctaacttttactaaaatgattgtcagcaacctaaaagctaaccttgatgttggtagtgttgatagtaatcatacactttttactaactcagatttatctattgcaatgggagattactctggagataacctgattttcaatagtcacaataaacttgatattacatccggtgatattgaaatagctcttaaagattacacgctcaatgttcaagccgatagtcattcaggagaggtcgacatcacaaataaccttaagatctcaaaggataacacactaaccattacctcagacctcggtgacataactgttgaataacataaaaagccagctcacattagagctggcctttagtttattcattttcagactttggtctataaataataatacctacaactacaaaaataagtaagaaaatgaataacatacgtacttgatctgagatttgtcctgtcattgaaatagtttgacgaagacctgatacggagtaggacattggtaagaatggttggatgaccttaaagaacttaggactaagttcaattggataagttcctgcactagaacctagctgcaaaaggagcataatcatagaagcaaatgcaccatatctatcatcccaacccacaagagctgtaacgagcgccattaaagtccatgctgcaaggagaatcataccaaatgtagataatggatgatttggttcaactcccacaaatcgaatggcaatataaagggcaattgcagccatagtcgtaatgataccattgataaagaacttattcttagcccaatcaaaacggctcgtaaagtttcttcctgtcaagctcttagcaaagataacattagttgaaagagcgacgaccataagagaaacagaaatcatatatggagccatccctacaccattagtgtcaaccttatccttatcagttttcttctctttgagcggagcactaaccatttttgcattgtctgagtttacagatacaagagatagttgctgattagccttatttaatgaatcagacaatgtggaaaggttagttgacagacttgtcaatccatttgttaaggtatttccgcccgttgctaattgttgagctcctgtattgagagcacttgtaccactctgaagggtagcaaaaccagtcattaaactactactgttagcatctagagtttgagcaccactggcaatcgttgacacagcaccagtataagttgacaaaccagttgaaagtgcgcttgcacctgttgctagagtactttgagcagttgacacacctgaagccacttgagttgctcctggtgataattgattgacaagtactgaattgacattagcaatattagcttgcattgatgataccgttgaggaagctacagggagaagagcattcgccgaacttgcaatgcctgaaatagacgtttgtaaagaagctaaactacttgaatctccgctactagttgttgtcgtacctgtcaagctagataaagcagttgacatacttgacacatcagatgcaatagttgaagcataactactagctgtagatcctgcattactaattgccgatgtaatctctgcttgttgatctgctgtcaagctttgataagcagctgttccttgtaccgcagccaaatcatttgctttatcagttgcactagctgttgctatagagctagctgcagaagaaatatttgaaagataagtcactattgaacttgtatctactgatgttgttgatgttccacttggtaatgatgtattacttaccgctgtattaagattttgaattgctgtatttaaatcagttaaattagttgacagggttgacaactgtgcttgctgttcttcagataaacttgttgctgtagccatttgactgagcgctgtcgacaacgaatctgcacctgtaactaaggtattcatggcctctgctcctgatacaaattgacctgcagcagaattaacagcctcagagttcgcgtttaactgtgacaaagcgcctgacaaagttgacacacctgaagtataggcagacgcgcctgaactcaaggtatcaacacctgtagccaatgtttgtgtagatccagcaagagttcctaagccatttgataaggtctgactcccagactgaagtgcgcttgcacctgcatataattgactagccccattcgctgcagttcccataccaccctgaagttgagacatactcctaaagacagctccaacataagttgatgtaatatttttagaaacagtatccttcaacttagacatggcagaatcgctcatttttgaagaaacgaagctatgtcctgctgttgtttgataagaaatttccagtttcttgggatcatttgtcaaaagacttgctgcattacttgagaggttttctggaaaagtgattaccatatagtaatcaccatcctcaatccctttttgggcttcattttcagttacaaagtgatagtctagatttttgtttttagacatattgtctaccatatcatgaccaatattcagagtcttattctggaaactagcactcttatctttgttcactactgccactggtaagtgtttgacattaccgtaaggattccacatagaagacaaaaagattaaattatataaagcaggtatcaatgagacaccaataattgttatccagagctttggacttttaagaagagcctttaattctgctaacatatttctcctttttagacattgtgtttatttttatgatataatcaattataaactcatttacctgaaaatcaatgttaaacaatcgatttttggacacatagtctaaaagtgtataaaaggagatttgtatgtcaaaagatcaaagacgcgcgcaaacaaaaaaagctcttttagatgctttagtaatatgtcttgaagaccaagatttcaatgatattactaccattcgtctggttcaaacagctgggattagccgttcgagtttttatacccactacaaagataagtatgaaatgattgatagttatcagaaagaacttttccacaagctagagtatatcttcgataaatatgaaggaaagaaagagggagcctttctcgaaatctttgaatttctcactcgtgaaaagctcctatcagctctattgtctaccaatggatcaaaagaaattcaagattttctgatacataaacttcagcgtatgatagctgaggacttcattgatcccactgctgaagaaagagctctcaaaggattcgagaaagactatgccagtatttattttgcgcatgctatttttggcgcttgtcaagcctggataaataaaggaaaaaaagaatcacctcaagaaatgacagactttcttctacgatttattccacaataaaataacttcaaaagcataaaaaagctgcaaaccatttcaatagttaaagcagcttttttcttttacaataaaatccttaaaataagggaatgataagtgaaagcaaggtcaaaattgcgggtccgccttgcgttaaaataattttcttattggcagttatagcaccataaatagcagcaaagaaaacattgagtacaaaaacagttacaagtagctgactatttgtacaaatcccatacaagaggaatacagcaatcaaaccattgtaaattccttgatttttaaataagtttgtaacagaattacgttgaagttcttctttgctcatattgaaaacacgactagtcgtgtctgaatgtgtcgcaaaagtttccaaatacatgatatagagatgctccaaagcaacaatcccagctaaaattagtgtaataatagacatagtagcctccttcttaagtaactttgacagtatatcaaaagtaaacctttaaaacaacatgcatgcttcatacaattcgaaatatggtaaaataaagaatgaaagagaggttcttatgacaaagacagaagtaatccaacgtctccaaaaagatctgggaattcccagatttcaggcttatatagaggataaagattactccgaagaggagtacgaccaactaaaaaaagattttgaagcctatttcactaactacgtttcaaatgtttcagcagattttgaaggcggattggataataaataatttatacctcaaaatcatctatcatcatattacgaatccccagtcacttgtactagactagggactttttttattagaaaacaaaaaagccgtctcattctatgagatggccatggaatcaatctagcaaatatctaagcaaacccagaaatcaacgatttaagataaacaaaaaagcccataacaacgggctttttgcaaaatgaatcttaaaattaaagcattttgttgtagaattcaacgacaagtgcttcgttgatttctgggttgatttcatcacgttctggaagacgtgtcaatgaaccttcaagtttttcagcatcgaatgatacaaatgctggacgtccgatagtagcttctactgcttcaaggatagcaggaactttagctgatttttcacgaactgagattacttgaccaacttcaacgcggtatgatggaatatcaacacgtttaccgtcaacaaggatgtgaccgtggtttacgaattgacgtgcttgacgacgagtagttgcaagaccgagacggtaaacaacgttgtcaagacgacgttccaaaagaaccataaagttgaaaccaagtgttccacctttaactttagtagcttgtacgaacaagttacggaattgtttttcacccaaaccgtatgagaaacgaagtttttgtttctcagccaattgcaaaccgtattctgaaagttttgaacggttgtttggaccgtgttgacctggtacgtagttacgacgtgccaattctttacctgtgcctgtaagtgagaaaccaaggcgacgtgattgtttccatgatggacctgtataacgtgacattaataatgtcctcctataaaaaatatttttaggaaataacgttttagataaacctgattcgttcagaaagacttcgcccaaacagcaaaggttacttttctagccgacttcctgttgacgagcttcattttatcctgctattatttcacatactttaacattttaccacgaaaaaaagcccaagtaaaggctttttcttatttattttcgatttcagcttgttcctcaggactcaaataacgaatgagagtcttctcagtcaaaatatctgaataagtgtaagattcaacataactattattaatagctcctgcttgagaactgaagtcttgatattcaacaataaacaatgatggataaacttctgtcaatcgaccaattttattcttttcacgtttacgtccattctctagggtcaattctactagctgaccttcatgtgacttaatagcttccttgatgtttttcatcttagcaacatctgcaaatgcatcactcatatatatctccttaaatctgaaaattatgattcctcaaactgagcaatcgatgaaaatttattgtattctttttggaatagtaacttgactgttccacgcgcaccagcacggtttttttctaggataacttcgatggtattatcttcaatcgcattctctggttcttcaccctcttttcggtagtaatcatcacgatataagaaggctacaatatcggcatcctgctcgatagatcctgactcacgaatatcagacaagactggacgtttatcctgacgttgttcaaccccacgagataactgactcaaggcaattacaggaactttgagctccttggccaggatttttaactgtcttgaaatatctgaaacctcttgttggcgattttctggtcgcgtccctgtaatcaactgcaaatagtcaatcacaatgaggcccagaccaccctcaacttcttgtgacaatttacgggaccgtgcacgaatctcagtaatctttataccaggggtatcatctatataaataggtgcctcagctaatgcgccttgagcaatcatcacattattccaatcttgctctgtcaattgacctgtacgtaaagcatgggaatcaatcatcccttcagctgccaacatacgatcaaccaagctttctgcacccatctctagagaaaagactgcaacagctttattttgcttggtaccaacattctgagcaatgttcaacacaaaggctgttttaccaactgcgggacgagctgctaaaataattaattgatcagggtgtaaacctgttgtaatcttgtcaaggtcacggaaacctgtcggcaagccagtaacatctgatgtttgctgtgaacgcatctccaaagtattaaaattgacatcaagaacttcagatattttgcggaaaccactacgattgctatgctctgaaacatcaactagggctttctcagcattcgcaataatttcatcagattcagtagcgccctcatatgcttggttgacagtctctgtcaatctatttataatacggcgaagcatggctttctcagccacaatcttagcataatactcagcatttgcggatgttgggacactattgaccaaatctacaagataagaaataccccctatattttggaggtcatcttggtcatctagaatggtgcgtactgtcgtggcatcaatggcatcatttcgatccgacagcgttaccattgctttaaaaatgacacgatgggaatacttgtaaaagtcgtctgcttcgataaattctcgaactgtaatcaacttttccgggttaatgaaaatagcccctagaacagactgttccgctactaaatcatgaggttgcactcgtaattcttgagcttctgccacaattattccctcctttacaagatttacttatagtgtcaacgaattactcagcactatttttgatgttaagtttaatttgcgcactcacttctttatgaagctttacaggaacctcaattagaccaatcgcacgaataggatgttcaagttcaatatggcgtttatcaactttaataccaaattgtttttgaagtccttctgcaatctttttggctgtaattgaaccaaaagtacgtccatctggtccaaccttctcagtaaattgaagacgattttcttctttttcaagttgctctttaacttgcttcgcttcagccaacaactctgctgcatgtttttcttcagatttttgcttacctttcaactcaccgatagcttggtttgtcgcttccttggcaagattctttttaatcaagaagttttgagcgtaacctgatggtacttctttaatttcaccttttttacctttacctttaacgtcttgtaagaaaataactttcattttagtcctccttgggagccaattctcccataatagtttcaatcaatttattttttgcttgagcaacactacagtctcgcaattgacaggccgctaaattgaaatggcctccaccacccattttctccataatacgttgtacattaatcgttttatggcttcgagcagatatattcacagtagaatcactggtcctagcgacaacaaaagttgcttcgatacctgccatggcaagcatcgtatctgccgccttagaaatcacaacattattataacatttaggattatcacctgaggcaacaatgatatcatctgtaatacgctcacctgctagaattagctcattgatacgtcgatactcttcaaaatcagtggcagagatcgtttggatttctccactatcacttcctaaactacgcagataagaggcgacatcaaaggttcgactagtcacacgagttgagaaatttttagtatccaacatgatacctgccataaggatagaggcttggattttactcaaacgttctggggcaccttggaattgcaataactccgtaaccaattcacaggctgaactcgccccgctttcaataaaggtcaaaacagcattttcaggaaaatcatcatctcgacggtgatggtctacgacaataacttcattaaatcgatcataaaaatccttagataaggttaaattaatcttagaatggtcaaccataattagcaacgaatgttggtttaccagctcttcagcctctgaaagtgtaataagaggtgactgaccatcttcttttaaccgttcgactgcacgctcaatatctgcattcatagtcgtatcatcgtaaacagcatagctttttcgaacaatttgactggcaaaatgagccataccgaccgttgcccctagagcatccatatcgagattcttatgtccgacaacaaacactttttcgactgttttcaacttatcagagattgcagtcatcatagcccttgttcttgtacgagaacgttttactgttgaaacagaacctcctccaaaataaagaagttccttgtgatcatcgttttccttgacaacagcttgatctccaccgcgaactagtgcgatattcagattctgcaaggcaacctgaccgatttgatcatgcttaagcgtaccaaatgaaattcccatgctcaaagttagtggtaaaccacgctcctgagcctgctgacggaagtcatccaagacagaaaacttttgatccatgaattctgtcaaaacactgtagttggtgaagaagtaaaaacgatcaccttcaatacgtcgataatgaatatgcttggccttagcaaactcagaaataaaccctgccacaaatgtattgatttttgaaacatcggcatcgggtaaacttcccgtcacatcgtcatagttatcaactgaaataatcccgataacaggacgagtcatatttggatcagcattttcatcttgatcataaacattgtcaataaaatatgtcaacttattgtcaaaatccacaaaagcggcatatttattatcaccaacggttatcacattcgaaggtgaaccctttcgtttctgggaaataaaatccgcaatcaactgcttattgaaatttccattttcatccgaaagtactagcttcgcataggggttgaaccattcaatatgatcgttctcatcaaaagtaataaccccaacaggcatctttccgagaagagtcttcaaagaatcttcaacatcctgattcagttcatctaattgctctatttctaaggactcatatgttgtcttttggtaatgcaataaggcaacaactactaccataataataaaaagcgcaaaaatgagtgcagactccgattttagtacgcgaacaaaaatagtagcaattccaaaaagaattagcccaatcattacaagatgaatcgttgcaaagtgaaatcttttcatataaaacctcttaatctaacaattataacataaaaaagccttaattaaaaggcttttaaacgtgttagcaccgttagtctactttcctgcgggccttattattaccttcaagataaaccatcaaaattgagatatctgctgggttgacccctgaaatacgactcgcttgaccaatggtctcaggattgattttcttaaatttttgacgagcttcggtagcaatggaatcaatagcatcccaatcaatatttttcggaatcctcttttcttccatacgcttcatcttagctacttgatccaaagctttattgatataaccttcgtacttgatttcggtctcaagcaactctataatcttagcgtccaaatcttctgcagctgggcccacaaactgagtagctgtggcgtaatcaatctctggtctacgcataaactctttagctgtcatggcatctgtcaatggcttaaagcctagagcttgaattttttcattcgtttctttaataggttttaatttttcttttgacagacgtgtcaactcgctgtcaaactgatttttcttaatttcaaagatactccaacgttcatcgtcaaccaaaccaacttctcgaccaataggtgtcaagcgcatgtcagcattatcatgacgtaatatgagacgatactctgcgcgtgatgtcaataaacgatatggctccaaggttccttttgtgacaagatcgtcaatcattacaccaatataggcatcactacgtttgagaataagttcaggtttaccttgaactttaagagccgcattgataccagcaactagaccttgacctgctgcctcctcgtatccagaagttccgttggtctgtcctgctgtaaagagacctgaaatcaacttcgtttcaagtgttgcacgtagttgatgagggagcacgatatcatattcaatcgcataaccagttcgcatcatctctgccttttcgagacctttaattgagtgaatcaactctttttgaacatcttctggcagactagttgacaggccttgcacatagacttcttcagtctctcttccttcaggttcaaggaaaagttgatggcgattcttatcagcaaatcggacaattttatcttcgattgatggacaataacgaggtcctacacccttgacaatacctgaaaacattggggcacggtgtaaattgttattgataatatcgtggctctcttgattcgtataagttagccaacaaggaatttgattctgaagataatcttcatccttcgacaagaatgaaaaatgattaggcttttcgtcacctggttgaatttcagtttcttcataattaattgatgatgccttgacacgaggaggggtacctgttttaaatcttcctatttcaaggccaagatccctcaggttatctgccaacgtgacagatgcaaggctgttattaggacctgaagaatatttgagctcacctaggataatttcaccacgcaaagctgttcctgttgtgacaacaaccgctttagctccatatttttgatttgtggctgttcttacaccaactaccttaccatcttcaacaagaatttcatcaaccatggactgacggagagtcaggttttcctgacgctcaactgtatgcttcattgtcatagcatacaaagctttatctgcttgtgcacgtaaagctctgacagcaggtcccttaccggtattcaacattttcatttgaatataagttttatcaatatttttacccatctctccaccaagggcatcaatctcacggacaacaatccccttggctgatcccccaatagaaggattacatggcataaaagccaacatctctaggttaatagtcgctaataaaaccttacatcccatgcgggctgcagctaagctagcttccacaccagcgtgaccagcaccaacaacaattacatcaaaattttcatcaaactcgtaagacattttttagatttatgcagtgatttacaatcagctgcccatcctttccttgttttttcctacaaaaatagccaaaactccagaaaactgtacgcaaaaacgcacaattctcatgagctttgaccatcatgactattgttaaagttattttatcaaatcaaatcgttttgtcaatgaaaatcactatttaatcaaggtctgcacactgacgataatcatctgtatacctatggagaatagtaaaagtcccatcattttcgttataattttcatcaaattttctcccaagaagcctgcaatttgttttgcacttcttaacaggagataagtgattacacatagtagagcaaaagcaactacggttatcagttgattctgcagacctccattagccagacttaaagcagttgtaattgtacctggtcctgcaaaaagtggcattgcaagaggagaaatagcaatagacattgggtctgaatttactgcttgctgctccattcctttatagctgggtgaatgattaccattaatcatatggtaaccgataacagccactaatattccgccagcaattctgaaagaaacaattgtaattccaaatactttaaaaatgaaatctcctgaaaagataaaaacagttataataacaaaggcaatcaaaagactcctaaaagcaatttttcgtgaaattttttgactatcatctgctactaaagccatgtaagcaggaagatttgaaattgggttcattatagcgaaaaatgccataaatgcataaaaaaattgtgaactcatcgtttttactcaactccagttagatataatgacaaacttttccgtctttatacgcctggtcaataataccgccgcctaaacattcctgaccatcatagaaaacaacggcttgaccaggtgtaatagcacgctgaggttcagcaaaaataacctctgctttatcacctttaacctttacagtaactttactatcaggttgacgataacggaattttgctgtacattccatttcaaattcttctggcatatctcgagtaaagtgaatcattgaagcgtcaagagaagttgacatcaacgactcatggtggaaaccttgacccacgtaaagaatatttttagaaagatcttttcctactacaaaccaaggagcattatctccacctttttggccaccaatacccataccaccacgttgaccaatggtataatacatgagtccattgtgttcacccatatcacgaccatcgacagtcatcatacgacctttttgagctggtaagtattgactaagaaactctttaaagtttttctcaccaataaaacatattcctgttgaatcttttttcttggctgttgcaagacctgcacgttcagcaatctcacgaacttctggcttttgtagatgtcctaaaggaaacatcgttttctgcaactgctcttgcgaaagttgactaaggaagtaggtctgatctttattgttatctgcaccacgcaacatatggacaatgccgtcttcatcgcgaacaacttgagcgtaatgtcctgtagccacataatccgctcccaatgtcatcgcataatctaagaaagccttaaacttgatttccttattacacataacgtctggattaggggtacggcctgcacggtactctgctaagaaatactcaaatacacgatccaagtactctttttcaaagttgacagagtaataggggataccaatctgatcagctactgctgctacatctttataatcttcggttgctgtacacacaccaaattcatctgtgtcatcccagtttttcatgaaaacaccgattacatcataaccttgctcttttaaaagtaaggctgttactgatgaatcaacgccaccactcataccgacaacaacacgtgtttttgaattatcagtcatagataactcctcccatcaaataaaaattaacatagacttgaagggtctagttattcaaatatcgatttgaaggtcgattttgaagcgtaaaagcacgcaaacttaattatatcatgattaaagaataatgcaaaaaggttaccactaggcaacctttttgatacttattttcgtgtaaagccactgtaaacctattactcctaagactattattggaatcaataacgctacaaatagccatcccggctccttataacttaacacaagtttattcggtccttcttgtgatgaaacggtcggtgtaccaatcgttgacaagctatagtcattcttgtctagttctttattatttagcgtcaagatggaatctttatagacaactatcggtagattcagtttctccccttcagcagcctgccaagttaatacaagataaccatcctcgagtagcttttctgccttctgattcgtaacgatattttcgtaataaagatcgtaagtgttctgcttacctattgtcccataaatcggtacgtaatctggtgtgggtttgacaactaagtttaaaaactgtgacaagtcactgtcattcatggtaagacttatcgtctgataatctccttcaacgtaagtatgtttaacaatggaaataagttcaccatcttgtgccgcagtttttacacgatcggtagtatccatcatgttctgaataagaccaacacccgcaaaggcaaagagtaaaacagcaatactttttcgccagtttacaaatcgcgtgaccgttaaccccgtaattgctaaaagtaaaatagtggcaggaacaaagaatctaaatggaaattgaatcagttcagcaaatgtatttccattttctactagatactgccacggaaaaaggcctgtcgacaagaagaagaagacaaaataaataaagtgcagtatttttttccatctagcaaatttcttccaattcaaaacagcgtaaagaaactgtaaaatgagtaacaccattaatgaaattggggtatatagccagtatcttgctgtcccatctatcccattcttaccaatttctctatttataaatggatctaagagatgattagtccctctcaaatataggagtactaaccagacattgacagtcagtaagagaaacagaatgactgctataaggacttgtacgaaggtttcctttttcttagctataggagactttacaaaagtgtaaagataaaaaggaagatacatcatcactaatatcaaagcactgagtacgtgaacctgaaaaatcaatgccatagataaggcaagtctaattggttctactttttgataaaagacatagtgaattgccggaataaaacaaaaaggtagtaatgctgctccccaactagagaaaccctgtcgcatcgtccagtattggatagagaatgttgtcgcatagagtaaacctagtgacaaggcaatatttgtcttaactttacactgcttgagcaaggcatacattgaggactctgctagtatatgtagtaatacccttgacacaatctgataacgaaaccaagtgccacttattaaaataagccctccttgtaaataggcaaaaaaaggaccgtaaagagcattgacaatgcggcctgactgttggaatccatataaagataaaaagtaagaaaggttaccattttttagttgcatagcagcttcatagaacctgttatagtgaaagatggaatctgaacctaaaatgacttttcttgtaaatagttgtggtgtaaccaataacacagcaaaagctataataataagagaaacccacaacttttctcttaatttaaaaatttgtttcattgctatacctttcattcctattataacaaaaatgccatgccctacctagtaataacaaaagctctataaaacagatttcctacatccaaattaaaaagctgagagtaggctcccaacttctattaatatttaatattagtaattccaagctgacaaaccttgtgcgttataggcattcaaggctgattgaatttgatcctcaactgttgcagtagagccccatccaggcattgtttgaaaaagacctgatgcacctgaaccatttgctgcagtatgatcaccatttgactcacgcgcaataattgactcccaagttgactgaggaacaccagtagctgctgccatctgtgccgccgcataagaatcaacttctcctgcagtgttcccatttgagagaacaactgacccgctaccagttgcagcaaccgaaggtgctgttccagtattttgagtcgacgtagtatcagtatttgttgaagcagcgcttgtagtagcagtatctgactgagacttttcagctgcttctaccgattctcctgttgtttctgactgaggcttactttcttcaaccttttctttattagctttattctctttacttgagctaatttctgttgatttaactaaatctgctgtcgattctgacgttgttgatgctgttgaaggtgctggggtaacagaatctgaaaatgcattaaccaaccctttattaattagtgtagacagtgatactgccaaaatgacaataaaacttgttacaattgctactggtaccgccaatgatttcttcgctgctaatttgatacggcgtcccttataacttttttttaacataaatccctcctagttaattctagttacattcatcataacctagtaatattactgccgattatttgtattatgtctaatgttacaatgacttatcattttaataaaaaaacgccaaaaatctggcatttttcccttgtttgtatgaggttttacaagttttcctcataagtcagtaataatgatttagtaccaaccattagcattccagaaagcaagagctgctgtccatgaaccataacggcttgctacataattatctgctaccttctcttgattttcaggagacaagtctccgttcaaatatgatgatgctaattggtaacgtccataatattgcccattttgagctgtatagctaccgcttgactcacgttgtgcgatttcctctttggcagctgcctctgaagaagaaagatttgtattggttgcttgagtgtcttcactttgtgtagactctgttgattgtgttgattcaacagctgattctgttgtagctgttgtagctgaaggttctgtagtctcttcagttgtttcattaattgttaagttttgaccaatagaaatcttattggcgtcttgaataccgttttttgaaacgatttcatctacggtcgtaccatttttcttagcaatagctgaaagtgtatcgcctttttgaactgtgtaagtttctgcattagctaaagctgttgccccaagtgttgctactgtaacaagtccaaaaagacctaattttttagtgttagatgtattctttttttgcatgatgatgctcctttatctatttatagtccaatccatattagtcaaagattttaagttattttattgtttatgactaatgggtaaatcaacttgcttattctatataaggatttttcaatccagattaagctgaagaactataaccatgtatctatgataccttggaaatataacatccccttgttagggatattaaaaatattacaagtaggttgggattagacgaaaaaagaacgcctacgtgggcgtccatctataacttctaggtcttaagacctagtttttatttatctcaacgagttaactcttaagataaaaaagcattaatcctaaagctaaaatagcaataattgataaggtatctcgaccattccatgaaagtcgacgatattttgttagtccttcaccaccttgatagcctcgtgcttccatagcaatcgccagagcatctgctcgtttaaagcttgatgcaaacaaaggaattaaaataggtattattgaccgtaccttttgaataatatttccttcaccaaagtcaacaccacgcgccttttgagcattcataattcgagtcgtatcatccatcaaagttggtacaaaacgtagactcaaagatagcattaaaccaatttcatgtgctggcactttgaaaacagtaagaggttttaaaagtgattcaactgcatcagataaacttaaaggtgttgtcgttagagtaagtagggtggaaaaactaataatgaggataaatctaaggaatatcatccaaccttgatttaaaccaacttccgtaatctttaaaaagccgatagaccaaagcacactcccttttgtattgaagaaaacttgaaatagggtagaaaataaaataatccaaatcattggtttaatcccacctaaaaagaaaccaagttttattttagacaagaaaaccaagaaaagtgtaaataaagttattacagcataagttaaaggattattagcccaaaagataataacaatataaatcagcatggctaataatttacttctaggatctaatcggtgtataaaagagtccccaacaatataacgtccaataattaacttatccatgcgacaccacctctacgaattcctcgattgtaatagggagactttcaaagtgataacctttttcttgtagctgtagcgcaaactccgttattttaggaacacctaactgcttttctttaagaaaagtaaccttttgaaaaacatctttaggagctcccgacaacactagttgccctttttccataacattcacagctgttgcataatcggcaacatcatccatcaagtgagttactaaaacaatcgtcattccagaaagatgtaactccttaaagagagacatcaattccttccggccctgtggatctagaccagcagtcggttcatccagtactaaaatatctggttgcatagctagaatccctgcgatggcaacacgtcgcatttgtccccctgataaatcaaaaggattctgtccatgaaactcttctgggagtccaactaattttagactttcaatagcacgttgttctgcttcttccctagaaactccgaaattttgaggtccaaaggcaacatcttctaaaacagtttctgcaaataactgactttctggaaattgaaaaactaaacctaccttcttacgaactggttttatgtccttattctttgattgactggttatgatcgtatcatcaacttgaacctgaccactagtgggtaaataaaggccattcaagagctgcataatagtagatttaccacttcctgtatgtccaataaaggccgtatatgaaccatcttttatcgtcgtcgtcatatcaaaaagggcacgcccctcaaaaggagtacccgcttgatagatataacttacatttttgagagaaattcccatagttgttctaccaattccttttctgtcagatagtcttcacaatctatcagacctttatttcttagcttttgagttaataatgcactaaaagggatatctaaacctaagtcaactaactctgagcctctactaaatagttcacgaggacttgaaacagactccactttaccttttttcaaaaccaaaacacggtcactcaaagcgacctcatcgagatcatgagtaattgataaaacagtcattccgtattctttacgaatagctttaatagattgaatcaattcctggcgaccttccgggtcaagcatgctagttgcctcatccaaaatcaaaatagatggtctcatagctacaatacctgcgatagccacacgttgtttttggcctccagataatctagctggctctctatccttaaattctgacattcccacaaattccagagactcttgaactcttgaagccatttcttcatagggaacacctttattttcaagaccgaaagcaacatcatcttcaacagttgccccaacaaattgattgtctggattttgaaagaccatgccaatcttatcacggatatcccagacattgtcttctgttaattcttgaccatcaacaataatctgcccagactctgccactaatagtccgtcaataagacgtgctgtcgtggattttccagaaccattatgccctacaatggataaccattccccacgtttcacgtgaaacgatacatcatcaagaatataggatggttgatcttgatgatatttaaactttaaattttttatttcaatcattgatttatcgtactatttgaaagtatccttaaataagaaacctgcacctttgaaataatcatagcctgagtaaattgtaaagaacaaagcaatataaagcataattgttcctacaaaatgcagatgacacaataatagaataatagataacatctgggtcactgtcttaatcttaccaggcatagctgcagcgagaactgtaccaccgttctccactaataaaagacgaagacctgtgactgcaagctcacgacagataataactgaaaccacccaggctggcgcttgattaataccgactaacataataaatgctgacatcactagcatcttatctgccaatggatctgcaaatttcccgaaattagtaacaacatgccattttcgtgccaaatagccatctaaataatctgtaatactggcaatagcgaagacaaccgccgcagcaatatgcatgacattacttgacgcaagtgatgtcatcagtaaaaagataggaatcaaaacaattctagcaagtgtcaataaattaggtaaattttcttttttaaacatttcttctcgattctattggattcttaatgtgaggtagctaggtgtatttttatctaattgagataaatcaagtgactccccatttacctttagagttacttttgaagattgagcaataataatttgagttggtttagttttatcagaaaaatctaaagagtattttgaatttttcgtttttgaaaggaggtaactctctgaagtatctgagttatctactgaaaaccatgtgtcatcactatcttttgataactccacatctaaaactactgaagaatttacattggagaaatcaaccattagttgattgccttgagttgtcgttgtaacatttgcccccgaaacggtaacctcagaaatgcttcgtgacgatttagccctactagccgttgacagatgattaactgtagagatagtatttggttttatcacctgaggttgattagaaagatgtctaataataatataacctactgagcagatgataagtaacgaaaccacactaagcattagtaaaggtagatagttagactttcttttttcttcacgtttatgctttaaaaagcgtgacatgggagctttagcagctaaggtatcttccttacgttcaactggtttcttctctttttttagtttttgctcattctgtttctgctcctcaaacagacgttttccatctaaaccaaccgaagtggcatacttttcaagcgcctcttgctgaatgtcctctggcaaagctttaagttgatccatttccatagccagaagaaactgggcttcgactccagaaattttttctacatcatacaaacttaactctttctttatacgcgctgcacgtaattgctcacctagagagtgtaacttcatttttcccctttctaatattcttctttgttttcgtgtctctattatagcaaataatcacttatttagggaagacaacaaaatcggtaatctccatatttgagagatagtgattcaaaaaatccttcaactccttggaagtaatgctcatcagttcctgaccaaaatcaaagtatgttttatcattctcaaaataagctaaatattggcttcctaaattctggatattgtctagactacgtaaaaattcaccatacaaagctttcttttgtagatccaatgcttcttccgtcaacaatcgttttttatctgccgatgtcatcacctgacgaattaaacttgacatacggatcggttctgcagtgtccatagtcataatgacaaatgaatatcgattagatacctcgtattcaattgacacagactcgtctatttttccttcagcataccaattttgataataaggagacgtccagccaaacagtaaattgaacaataactgtaccagtatgttttctctcatacgattatcagtaaaaggaacactcttaaaaccaatggctagttttgagatgaatatctccatttgaagactatctaatttttggatatctgactcaatgagatgcttttctttctcgactattctctcaggtggtgtaaacttactttgtttttcattgacaaaagtgtaaatgttttcaacatcaaaatcgcccactaagacgagatgacagtttgctgacctgtaaaagcaatcaaaattatcttttaagtcctttacagtaatttcttcaatactatcaacacttccagcaatatcttgagctaatatagtattaggatacaagctttgcaaacaacctagataagctctgtagtcaggatcatcctgatacatatttatttcttgttcaataattcttttttcatgattgacagcatcttcagaacttgtaaagctcgatgtaaactttaataaaagctctaaagactcctcaaagtggtcaagggtagaaaaataatatgttgtcttctccaatgttgtaaaagcattgacatcagctccaagcttgacaaaatccaatgtcacatcccttccctgctcatcctcaaatagcttgtgttcaagaaaatgagcaatacctgcagggtaagattgtaactcaccatcaatatagaagtgattatctagcgccccaaaatttgttgacaaaaaggcggctttttctacaaatccttttttcttaatgattgataaagacataccactatctaaaattgctgaataaacttcttcatcaattttttgataataacgtttcttcaaagcagccattctaagacactccttctaaaaagaacaaactctgtagcttaacttgacgcgctacactgcaaacatcttttttagtaatcttctcaatctcatctatccaattctccaatgaaagacttttatcaccaaaaatcacctcattaaaacgttgttccactaatgttaaggcatgatcttcagagagtagggcattcattcgtatgatttttttggtttgattcaggagagaacttgaaaaacgtcctaatttaatgtaattcaactctctactaattcctcgcatagcctgatttctattagatttttcaattccagcgtaaacttccagtaaacctgtaaagatatcaaattgactactaattgaataagccaacccttccttttctcgaagtgttgtaaacaaggctgaatgggcaaattcaccgaacatggcattaaatacaatcaaagcaaagtaatctttatctccatattgacacggaaattggtaccctagctgtaaaatagattgactactctgtctaggttctatcttttctttcacaacattgacataaggttgactatagctaaactgtaaatcaatttgacgtccttccaaaggaaaacgatgtaacgcttggagtacttgataatcatcaaattctccaaccataaagatatcaatacgatctcttgtcaacatgctttgaaattcttgataagctgtaaaagaggtttctgcttcaacaagttctacttgaccatatttgggaactttcaatccctcgtttacaaaataaagctctcttcccttaacttcactgtaatagtaattattctctgtgtcaacatccaggtaggtcattaaattttgtttttctatgtcaaatactttattttggtattgagctactcttgacagcggcttgtaaagacactctttcaaaaatcctagcacttcccaaaataatccttcattcgtagggataaaagcatctttcagatatgtcaactcgatgtcaacgctatgtgtcaatcctttagttgacactctagttgacaactgtgttccataaagagaagctagtctctctttaaaagactgtactgttggatacgtctgattggctgtagccaacatttgtgaaactagggctcgtttagcaattgtttgtttattcaaagaacctgtcattcgaaaaacaatacgattagttttatatttttgtgttggaatgaagtgtacatagacaccatcagcaattttcattgataacctctaaaaagtttatgcttccaattataccatttttatgctatcttatctcaagagaaagttgaggtactatgaaatataaattatttgatgaatacatcacactgcaggcacttttaaaagaattaagtatcattcatagtggcggagctataaaaggtttcttggctaataataccgttttattcaacggtgaggatgaaaaacgtcgtggaaaaaaacttcgttatggagatgttattaccattccgtctgaggaacttgaaataacgattgtagctccaacgacaaatgaaattgaagaacatcaaaaagaagtcgctgaaaaagcacgtgttgctgccattgttaaaaaaatgaatcaggataataaaaagaaacaaaaagcacatccgtcaaaagaaagcaataaaactaaacgacaacccgttcgtttcccaggaacctaactatgtggctcgaaaaaattgatattcaacactttagaaattatactgaagcctctgtgagcttctcacctcatctcaatatttttcttggtcgcaatgcccaaggaaaaacaaatattcttgaggccatctattttctagcattgacacgtagtcatcggacccgttcagataaagaactgattcaatttcaacaaaatactctcaaactgaacggcatcgtgcatcgtcatagtgggaagctacctctggaaatcagtttatctaataaaggacgcataacaaaggttaaccacctcaaacaagctaaattatccgattatatcggtcacatgactgtggtgctctttgctcctgaggatttacaacttataaaaggatctccaagcctaaggcgtaaatttatagatattgatttaggacagattaagcctgtttatctctcagacctatcaagttataatcatgtactcaaacaacgtaatgcctatctcaaatctactgacaatgtagacattaatttcctctcagtgttagatgaacagctttccgattttggaacacgagttatcgaacatagactagaatttatcaagcaattagaggaggaggcagatagacatcatagtaacctctcaaatcagatagagcgccttaaaatctcctacgaatctaatatcccactggaaaataacaaagttattcgcgaatcatttttaaccacgttaaagcaaaatcacaaaagagatatcttcaaaaagaacactggtgttggtccgcatagggatgatttaacattttacattaatgacataaatgcatctttcggtagtcaggggcagcaacgtagtctcatactttctttaaaaatggctgagattgctctgataaaaaaagtaacaggtgaatttcctattcttctcctcgatgatgtcatgagtgagcttgacaatcaccgtcaacttaaactgttagaaagtattgacgaagaggttcaaaccttcatgacgacaacttcacttgatcatctgagtaacctaccacctgatttaaagaccttcttagttaagaatggtgatatttatgaaaaacaagtcgattaaacgacttgtttttctatttttcgtgattgacacatgtgacaatcgtcacccaataagttgtcaacttttttcgcccaccccctctactgacggtcgtaatcacgtaaacttgctgtaaacttatcgtaaacatcactgtaaacaaaaagtacttacctgagataagtactttttgtttattaatgagctgagtagttaggcgcctcgttggtaatttgaacatcatgagggtgactttcaataagccctgcacctgacatttcaacaaactgagctttatcatgtaaagcctggatgtcttctgcacctgtataacccatacctgcacggataccgccaatcaattggaatacaatatcagcagcagaacctttataagctacacggccttcaattccttctggaacaagtttattcgcttcattaactgcaccttggaagtaacgatcgcttgatcccttcttcatcgctgcaattgatcccataccacggtatgatttatatttacgaccttggaaaatctcagtttcacctggtgcttcatcagtaccagcaaacatagaaccaagcattacagcattaccacctgctgcaagagcttttacaatatcacctgagtatttgataccaccatcagcaatgattgtttttccgtattcacgcgcaacacttgcagcatcgtaaatagcagtgacttgaggaacacctacacccgcaaccacacgtgttgtacaaatagaacctggtccgatacctactttaacgacatcgacacctgcttcataaagtgcacgcgcaccttcagctgttgcaatatttcctgcaatcaaagtacgatctgggaagtgggcacgaatttcagcaattttacgaagaacacctgctgaatgaccatgtgcagtatcaatgacaatagcatctgcgcctgcttcaaagagagcttctgcacgttcaaaggtatcagaagtaacccctacagcacctgctaccaaaagacgaccgaactcatccttagctgcattaggaaactcgataactttttcgatatccttaatagtaatgagtcctgacaaacgaccttcttcatcaactagaggtagcttttcaatacgatgctcatggagaatactttcagctgtttcaagatctgttccaactggagcagtgaccaatttttcagaagtcatgtgttctgaaattggagtatcgtaattagagataaaacgcatatcacggtttgtgataataccaaccaatttacgattttcaagtgtctcaacaattggaacccctgaaatacggtaacgttgcatcaactcttcagcttcagcaactttattttcaggcgttaagaagaatggatcaatgatgacaccattttcagagcgctttacttttcgaacttcttcagcttgttccgcaatagacatatttttgtgaatgacacccaaaccacctgcacgagcaattgagatagccatcttactatctgtgaccgtatccatggctgcagtgataattgggatatttaatgtcaaatttttagccaatttcgtcttcaagttgacgttgtttggtagaacatgactttccgcaggaataagcaatacgtcatcaaaagtgtaaccttttttcaagaatttagtgtcccaatttgacattataatcgtcctcttttctcaaagttttgaggtaaagaaaccccagtctattttttaattgataatatcatatcatgctaaaatgatttgtcaacagatttcgcataagattctaagaaaacctttttccaaataaaaatagggctccagattatcttgagtccctactttttatttcttaaaaataattaattcccattgcttcttttacttctgccaatgtttgtccagcaacttcacgcgctgcttgactacctttttcaagcatacggaaaacttctcccatatccttggcatattctaaacggcgttcacgaattggagctaactcacgttctaagatttctagaagataacgtttcgtcttcacatctcctaaaccgcctcgttgataatgttctttcatttcagcaattgtagtagcatcctcttcgcgaccaaagatatcaagataatggaaaaccatgttaccttcaatttggcctggatcttccacacgaatatgatttggatccgtatacatgctcatgacttttttacgaacagtgtcctcatcatctgaaaggaagataccattacccaaggatttagacatcttagcattaccatctagacctggaaggcgtcctgcagcttcattttcagggtagattccctctggctcaaccaaaatatcacaattataagtatgattgaagctacgtgcaatttcacgtgtctgctcaatcattggcttttggtcattacctacaggaacataatttgctttaaaggccgtgatatcagctgcctgagaaattggataaactagaaatcctgttggaatcgattctccgaaacctttttgagcaatttccgtcttaaccgttgggttacgctctaaacgtgccaatgaaactaggttcatgtaatacatagtcaactcagccaactcaggaatctgactttgaatgaaaatagttgacttcgctggatccaaacctacagagagataatctaaagcaacattcccaattgattctttgatgatctctgactcttttgcgtgatccgtaagagcttgctgatcagccaagaagacaaacatgttatatttatcttcgttttgtaaaaggacacgattttttaaactaccaacatagtgtcctagatgaagtttccctgttggacggtctcccgtcaaaataataggtttcgtcatataattacctctctaatacaaaaaaatccccacgcaaaaacatgcgtgagggcgttaatcacttttgatacgcggtaccacctcagttgataactcattctgcagctatcatctcaaaccttctcaacaaagaagttgcacgataaggggtgccaaacctaacgtttatgtgttcacgttaattgtcaattctcttcagcccattcattccaccttcatactggttttcagcaaccaccagctctctataaaaaaggatagaattactcttctgatgactattattctacattgttttatctatttttgtcaagattatgtttctagtttcacgtgaaacacaacctcagatacaaccaaaatagtcattacttgacggaaacttaaaaagacttgataataagaatatcatttctaggagatattatatgaaacgtcgaataatagacatacttttagttacactcggttcttttattgctgcggttggctataactcacttttagttaagaataatattgcttcaggtggtgtcggagggctagccattagtttaaacgccctttttggttggaataatgctaacttcgtcttagcaacaaccatccctttgttaattttatgttggttctttcttggccgcgaagttctcctaaaaaccttctatgggtctcttgtcttcccaacttttattaaattaactgagggcttacctacactcaccaaacaacctttgttggctgctatttttggtgggattgtattagggctaggactaggaatagtcttctatggaaattcctcaactggaggaactggaattatcacacaaattctcaacaaatatacgccactcccactaggaatggtactacttattgtcgatgggatcattgtcgcaatcagtgctattgcctttcctcctgatactgttatgtattccattctctcacttggagttgtttctcttacaattgataaaatgatggtcggactcaattcatcacgaaatcttctaatcatttcgcaaaatagtgaacaaatcctaaactacatcactagagtggctgatcgaggagcaacaaaaatcccagttcttggtggacataccggacatgcacaaaatatgattatgaccaccttgtcaactcatgaggttccaaaagtccaagaagaaatccaaaaaatagatgaaactgcctttatcgtcattgttcctgcttctacagttatgggacgtggatttagcctccaaaaagattaccaaagagttccaaatgactttattaatcccttgtaaaatcaattgaaataaagtctaatttctcgtaaaatagtagttaagaataaaaataaaggatattatatgcttactgtatcagatgtatcgcttcgttttagcgatcgtaaactttttgatgatgttaacattgccttcacgccaggtaatacttatggtcttatcggtgctaatggtgctggtaaatctacttttttgaaaattttagctggtgatatcgaaccaacaacaggacacatctctcttggtcctgatgaacgtctttctgtccttcgtcagaaccactttgactatgaagaagaacgcgttatcgatgttgttatcatgggtaatgagcgcctctacgatatcatgaaagaaaaagatgccatctacatgaaagaagatttttcagatgaagatggtgtccgtgctgctgaactagaaggactctttgctgaattaggtggttgggaagctgaaagcgaagcctcacaattgcttcagaatctaaatatcccagaagaccttcactatcaaaatatgagtgaattggctaatggtgacaaggtgaaagtgctccttgcaaaagcactctttggtaaacctgatgtacttcttcttgacgaacctaccaacggtcttgatattcagtcaatctcttggcttgaagatttcttgattgattttgaaaatactgttattgtcgtatcccatgaccgtcacttcttgaacaaggtatgtacgcatatggccgaccttgactttggtaaaatcaaactctatgttggtaactatgacttctggaaacaatcttcagaattagctgctcgcttgcaggctgaccgtaatgccaaagcagaagaaaaaatcaaagaacttcaagagttcgttgcacgtttctctgccaacgcttcaaaatctaaacaagcgacttctcgtaagaaaatgctcgataaaattgagctagaagaaatcgtcccatcaagtcgtaaatatccattcatcaatttcaaagcagagcgtgaaatcggtaatgaccttttaacagttgaaaatctcactgttaagatggatggtgagactattcttgacaacattagtttcatcttacgaccaggagataaaactgccatcatcggtcaaaacgatattcaaacaactgcattgattcgtgctcttgccggtgatattgactacgaaggtacaatcaaatggggtgttactactagccgttcttaccttccaaaagataattctaaggaatttgcctctggtgaatctatccttgaatggcttcgtcaattcgcagaaaaaggtgaagatgatgataccttcttgcgtggatttcttggacgtatgctcttctcaggagatgaggttaataaatcagttagtgtcctctcagggggagaaaaagtacgtgtcatgctttcaaaactcatgcttttgaaatctaacgtccttcttctagatgatcctactaatcacttggatttggaatcaatttcaagtctaaatgatggtgtccgtgacttcaaagagtctgttatctttgccagtcatgaccacgagtttatacaaacaatagcgaaccacatcgttgtcgtttcaaaaaatggggttattgaccgtattgatgaaacttatgacgaattccttgaaaatgaagaagttcaagctaaagtcaaagctctatgggctgattaactataaaaagacacaggttgggatatcccaacctgtcttagtatcattatgacaaataaaaaataccaaacgacctcattattttatctggctgcttttttcatacctgtaataatcatgataggtgtccttttcagccaaaaaatctatccaggtagtgaaagaactattttaacaagtgatggttttcatcaatatgtgatatttgcgactgaacttaggaatatacttcatggagatgggagcctcttttacaccttcacaagtggtctagggcttaatttctatgctctaacaagctattacctaggttccttcttgtctccactttactatttctttactgtcaaccaaatggccgatgctttttattatataacactccttaaattcggccttattgggttatcaggagcttttagttttaagcggctctttacaaaagtgtcaagaagtttcatcctatgtctttctacaggattttctttgatgagcttcgctaccagtcagttagaaattaatacctggctagatgcctttattctagcacctctaatcatattaggtttacacctcttactaagattcaataaacggggcttatacttttttagcctaacctgtctttttatccaaaattactattttggttatatgatggctattttcctaaccctttacaccatagtacaattgataactatcaagggatggaagattaagattcttcatttcatagactttggaattgtttctatacttgctggtttaagtagtgctgtcatgttactgcctacactacttgacttgaccacacatggtgaaaagtttacaggtgcgtcaagtttgttgacagagtccacctattattttgacttctttgcgaaaaatctcgttggagtttacgatactactaaatttgggtcaatccctatgatttatgtgggaatcttacctttgattctttttctacttttctttattagtagggaagtcaagctatcattacgtctaggttatctcttattagtagctttctttatcgctagcttctacttacagcctcttgatttgttttggcaaggaatgcatgcacccaacatgtttctccatcgctattcttggctcctatctctcctaattgttcttttggcaggagaaacactcaaccgaattaaaaacttttcttttaaaagactcctcctatctttcttaggattgagtaccgcttacttactaacttggattttccaatctcactatagcttcattgaatcagtctcctggctattaagcctagcatttcttctagcctatgccattctatttattagctattttagacagcaaattcctgggagtgtttttcgctgtttcaccttcttattctgcatttttgagcttgcattaagtacttactatgttgttggagctctgggaaatgagtgggtatttccaactcgtgaaggctacctacgaaatatgtcagccattacaaaactagtttcagatactaagcaagcaaataagactttttaccgtactgaaaggttagaggctcaaactggtaacgacagtatgaaattcaactataatggtatctctcagttctcatccattcgaaatactgcttcaagctcaacactcgataggttaggcttcaaatctgaagggactaatttaaacctacgttaccaaaataacaccattatcgctgatagtctcttcggaataaaatataatttatcgaactttgaccttaataagtatggttttaatcacgtaacttctgaaaaaacaatggggctttatcaaaataataatgcaagccagcttgctatcttaactgatggcatttacaagaatattgacttcactgtcaatacgcttgacaatcaaactagcttgctaaatgctctatctggactcaacttaaactattttaaacgagctccatctcaactatttgataaagatgctaagtctttgaatcagcgcgtggctaaaaacgttagcaactcgaataaagattttgttacaataacctatcgagtcatctctccaccacatagtcaactctatgttagtattcctaatatttcttggtccgatgacaataaccactctctgtcaattactgtaaatggtgtgacaaggaatcaagttactgataatacctttgatttcttcgatcttggctactttgaaacagaatcaatggttaccatcaaacttagttttcctggcaataaagcaatatcctttgataatcctagtttttatgcccttgatactcaaaactatcagatagctatggatactattaatgaacgtgatagcaaggttacgacgtcaaataataaagtgttcgttgattatagtagtaaaacgaatgcctcactattcttcaccattccatacgataaggggtggacagcgaccataaaccataaaaaagttaagattcaacgagcccaaaaggggttcatgaaagtcgatgtccctagtgggaaaggtaaagttgttctaaccttcattccctatggtcttaagacaggtttattgattagtctattggcaagtatcatattttgttgctacgcttatttcatcagaaaaataaccgttattcaaaaacgctgattatcttaaataaaattaaataggtctggaacaattgttccagaccttatttatctttgggtacaaaaaaactcaagctatacaacttgaggtgtcttatcactccgccagtaggactcgaacctacgacatcatgattaacagtcatgcgctactaccaactgagctatggcggataaaactgctaagtagcaaaaatagtccgtacgggattcgaacccgtgttaccgccgtgaaaaggcggtgtcttaaccccttgaccaacggaccaagttctgagatttttatctcgttaacactcttattattatatcagagtattcgattttgtctatactttttttcaaaaaaaatattaaattttgctaaatttattcgaattttacgttagtttttatcttgcttttacaaagtattgacatgttgctatatattttgtaaactaatagagttattggtcccatagctcagctggatagagcattcgccttctaagcgaacggtcgcaggttcgaatcctgctgggatcagataaaaaacgcaatctagaatctctagttgcgtttttcttttgcctcgataaataggaaataatttaaaacaagcaagggaagcaaagtcgtatataggctgtattcatgtaaatattgagcaaaccaagttgaggctgcaactcctaccataaatgtaaagatgataataatagtgtaagaagcttgtttaagcactttgggatccccctcgtcaatagccctggcaacggttaaagaggtattcgtaatattaccagtcatcatgaaggaagcataatttacccctctgacgcgcttaaaaatccctacctgaagagaggcaaaaaatgccaagcctgcaatcgtaatagtagaatcaacgtaaggtgtaataatggcgagaatagtcatcaagagaaaggcaagtctaatcgcttgcaaatgccatccccatttatggttaatgagccacttcttaacaaaaaaaacaaaaaactgacctaaaacaaagaaaaaaataggtatcacatagctgaaagctcttgcaatatgcccctcaacaagatgaataaccaaataaaggagattacctgtctgaatacttgcaaatcgtccgtcttgagtattgtaagtataggcatcaatgaagccccctatataacttactagagttgctacccgtaatccttcaaaaacacgataggagcgttttttcattctgaacatgtctgtttccttcttctacttatggtaaggacttccctgctgaatcatgaatgcgcgataaatttgttctactaatacaaggcgcataagctgatgagggaacgttaagagaccaaaactcattaattgattagccctctttttcactgtaggagagagtcccaaacttccccctataataaaagtaatatctgaatagcctctaagagtcgcttgctctaactctttagcaaattgctccgagggaaattgttttccttcaatagctaaggcaatgacataatcacgatcacctactttagccaagatacgctgcccctctttgtctaggatagctttattttcagattcgcttgcattatctggtgtcttttcatccgttaattctatagactcaaattttgtaaagcgtcctagtcgtttgacatactccgcaatgccatctttcaaatatttttctttcaattttccaacggtaatcaatttaactttcataggcttattatagcacatatccacaatcttttaacaccttatccacacctttttactgttaagaatctttagttatccctataaaatagcttcttatctacactttttgaaacttatccacagactgttgataactgttttttaaaatcactttatgatataattaagcttactttgatatgtttatcaaaaaggaggactaaacgtgaaaaaatttaactggaaaaaaatagtagcgccgattgcaatgcttgttattggcttactaggtggtttactaggtgcctttatcctactaacagcagcaggggtatcttttaccaattcaacagatacaggtgttaaaacagctaagaccgtatacaataatacaacagatacaactaaagctgttaagaaagtacaaaatgccgttgtttctgtcatcaattaccaagaagggtcatcttcagattctctaaatgaactttatggccgtatctttggtggagatgatagttctgactctaaccaagacaaatcaaaagattctgatgggttacaagtcgctggtgaaggttccggtgttatctataaaaaggatggtaaagaggcttatatcgtaaccaacaaccacgttgtcgatggcgctaaaaaacttgaaatcatgctttcagatggatcaaaaattactggtgaactcgttggtaaagatacttactctgacctagcagttgtcaaagtttcttcagataaaattaaaaccgtagcggaatttgcagactcaaactctctcacagtcggtgagaaggcaattgctatcggtagcccacttggtaccgaatacgccaactcagtaacagagggaatcgtttctagccttagccgtaccgtaactatgcaaaacgacaatggtgaaactgtttcaacaaatgctatccaaacggatgctgccattaaccctggtaactcaggtggtgccttagtcaatatcgaaggacaagttatcggtattaactcaagtaaaatttcatcaacatcagcagtcgctggtagcgccgttgaaggtatgggatttgccattccatcaaacgatgttgtcgagattatcaatcaattggaaaaagacggtaaagttacacgaccagccctaggaatctcaatggccgatcttaatagcctttctagcagtgcaacttctaaattagatttaccagatgatgtgaaatctggagtggtagtcggcagcgttcaaaaaggtatgccagctgacggtaaacttcaagaaaatgatgttatcactgaaattgacggtaaggaaatcagctcaaaaactgatattcaaaccaatctttacagccatagtatcggagatacaatcaaggtaaccttctatcgtggtaaagagaagaaaactgaagaacttaaattaacaaaatctacagaagacttgtctgactaagtcattgacaaatctgtcaaaagacctttacaataatgtaaaggtcttttttcggaaaggaataacatgcaagaacaactcaaagctttacctattagtgacatctatcccaatccttttcaacctcgtatagagttctctgatgaagaattagcggagctaagccaatcgattgcagaaaatggactgatacagccaatcattgtccgaaaatcggatattattggttatgaactaattgctggggaaagacgtttacgtgcctgtaaacgtctaggaatgacagaaatccctgcagttgtaaagaaagttacagatcaagaaagccgtaaacaagctattattgaaaatttacaacgatcgaatctcaatcccattgaagaagcaaaggcctatcgtagtttaattaatgagctagcttatagtcacgaggaactggcgaaagctatggggaaatccagaccttatatcagtaacgctctcagactcctccaacttccccaagagatacagacgagtatcgaaaatggcaaactgagtcaaggacatgctagagcacttttagctgttgaggatacaaaaaagcaattaactatctatcatcaggtccttactgaaaaatggtcagttcgtaccctggaaaaaagacttcaagaacttccaaaaaaacaaaaatcaaaaaaagatattcatataaaagataaagaaaaagaacttgaaaaatcacttggtctccctgttactcttcgttatcacaaaaatcactctggaactattcagatccacttttcgacggaagaagattttaacagaattatcaacaagcttatttgacctgtgaattgagtagcaaaaagaaacaaacttatccacatcataaaacggttgccctccctttattttagagggtttcttttttcattcacaacttgtggataactcttgtgcacaatgttaattaccttttttagcttgtggataacttaataagcttttatcttcagacctgtggaaaacttttttgttttatgataaaatcagagaacaagaataaagaaggagaattgatggaatgaccgaaaaagagcattttttttggaataagctcttagagctggccaaagaggaactaacacaagccacttttgattattatgtcctggataccaagctcatcaaagttcaaaataacgttgctacaattctgcttgaagaagtcaaaaagctattctgggaaaagaatatgcaatctttcattttgatggctggttttgaagcctataatagtgaaataaaagttgagtacgtctttgacgaagcactcttaaacgaggcaaattcaactgtaacaaacaatgactttggcaataaaaaggaacagcaaacacctgctcttcctacattggactctgacttaaatagtaagtacacctttgataattttattcagggggatgaaaaccgttggtcagttgctgcatctttagctgtagctgattcaccaggagctacgtataaccctctatttatttatggaggaccaggtctcggaaaaactcacttactcaatgccattggtaacaaggtcttacatgataatcctcaagcacgtatcaaatacattactgcagagaatttcattaatgaatttgttgtccatatccgtttagataaaatggatgaactaaaacttaaataccgtcatctggacgttctcttaattgatgatattcaatcattggctaaaaaatcaacgcaagccactcaagaggaattcttcaatactttcaatgtccttcacaataataataaacaaattgtcctgaccagcgaccgtaatccagatcaattgaacgagatggaagagcgtcttgtcacgcgcttcaaatgggggttaaccgtcaatatcacaccacctgactttgaaacgcgagtggccattcttactaataagattatggactatgattatcattttcctcctgaaacaattgagtatttagctggccaatttgattcaaatgtccgtgacttagaaggggccttaaaagatattagcttagttgccaatgttcgccagttagatactatcacagttgaagtagctgctgaagccattcgcgcacgtaaaatggatggtcctaagttaactcttattccgattgaggatatccaaactgaggtaggaaaattttataatgtcactgtaaaagagatcaaggcaactaaacgaacacaaaatattgtcttggcacgtcaggtagccatgtatcttgcgcgtgaaatgactgataactcccttccaaaaattggaaaagaatttggaggaagagaccactcaactgtcttacatgcatacaataaaatcaaaaatatgattgctcaagatgacagtttacgcattgaaattgataccatcaaaaacaagataaaataatacttgtggataactattaaaaattatacaaacttttccacaggctgtgcacaagtttaaagcattgataaaactatgttttgtacacttatgcacagtgtccacaagacctactactactactaaaataatactactaaaataaaggagcatcatgattcaatttgcgattaataaagcttatttcttacaagcacttcatacaactcgccgtgctatttcttctaaaaatgctatcccaattctatcaacgattaaaatcgaagttaccagtgatggtatctatttgacaggatcaaatgggcaaatctcaattgaaaatagtatctcagtttcagaagaaaatgcaggcctattaattacacagccaggtagtatccttttggaagccaactttttcattaatgttgtctcaagcttgcctgatgttaccctaacttttgaagaaattgaacaataccaagttttactgaagagtggtaaatcagaaattaccttgaaagggaaagatgttgaacaatatccccgtattcaggaagttgatagcttgacgccattactcatggacacaaaagtattaaaatctatcattgctgaaacgtcattcgcagcaagcacacaagaaagtcgtccaattttaaccggtgttcactttgttctttcaaatcataaagatctcaaagctgtagcaacggactctcaccgtatgagccaacgccaacttgttttggagcattctgcagataactttgatgttgtaatcccaagtcgctcacttaaagaattatcggcagtctttagcgatgatattgaaaatttagaggttttcttctcagcaaatcaaattctattccgtagtgaaacaatttctttctatacacgtttacttgaaggaaattatccagacacgaatcgtctcttatctgattcatttgaaacagaagttgttttcgagaccgctagccttcgttctgctatggaacgttcatatttgatttctaatgctagtcaaagtggtaccgtaaaactcgaaatcatcaatggtagtgtcagtgcccatgttaattcgccagaagtcggaaaggttaatgaggatattgatgtgcaagatgtttctggtagtgatttggtcattagtttcaatccaacctacctaatagatgctttgaaagctcttaagagtgagactgtacgtgtacgtttcatttcaccagtacgtccatttactttgacgccagctgatgacagtgagaattttattcaattgattacacctgtaagaacaaactaaaatcgaaaaagttatccacagtggataacttttttactagagaggaagtttatgtaccaaattggaagtttagttgaaatgaaaaaaccacatgcttgtaccatcaaagcaacaggaaaaaaagctaacgaatgggaagttacccgtcttggagctgacattaagattcgttgtacaaattgtgatcatgtggttatgatgagtcgtcatgatttcgaaaagaaacttaagaagattttataacagacattggggagtatagataagggggttcttgtgttaagaaaattagtttactagcaatataaaaactttctagagtccccaatcatcttctttatagcattctttgccttgctttcctttttatgattctcaaagggaagttgcctatttttaacaatttttgtgttataattaactgaattacttttttatggagaaataaattaatggctttaacagcaggtatcgttggtttgccaaacgttggtaaatcaactcttttcaatgcaattacaaaagcgggtgcggaagctgctaactatcctttcgcgacaattgatccaaacgtcggaatggttgaggtaccagacgagcgtttgacgaaactgactgaacttattacccctaaaaagacagttccaaccacatttgagttcacagatattgcgggtatcgtaaaaggagcatcaaagggtgaaggtcttggaaataagttcttggcgaacattcgtgaagtagatgcgattgtccatgtggttcgtgctttcgatgacgaaaatgttatgcgtgaacaagggcgtgaggatgcctttgtagatccgatggctgatattgatacaatcaacctagaattgattttggctgaccttgaatcaattaacaaacgttatgcgcgtgtcgaaaaaattgctcgtacacaaaaagataaagattctgtggcagagtttaatattcttcaaaagattaaacctgttctagaagatggtaagtctgcacgtacgattgattttactgaggaagagcaaaaaattgttaagggactcttcctcttgacaacaaaaccagtactttatgtggctaacgttgatgaagaccaagtcgcaaatcctgatgatattgattatgtcaaacaaattcgtgagtttgcagcgactgaaaatgcagaagtagttgttatctcggcacgtgttgaggaagaaatttctgaattggatgatgaagacaaagaaatgttcttggaagaccttggtttgacagaatcaggagttgataaactgacacgcgcagcctatcacttgcttggtctaggaacttactttactgctggtgagaaagaagtgcgtgcttggacctttaaacgcggcatcaaggctccacaagcagcaggaattatccactctgacttcgagaaaggctttatccgtgccgtaaccatgtcttacgatgatcttattaaatatggctctgagaaagctgttaaggaagctggtcgccttcgtgaagaaggaaaagaatatgttgttcaagatggcgacatcatggaattccgtttcaacgtttagaaaataaaaaatagtgcacaaggctgaaaagtatttttcagtccttttgctgtttatcaaagaggagaaataatgacaaaattagtagttggcttgggaaatcctggttcaaaataccatgagacacgtcacaatgttgggtttatggctattgacctaatggctaaggaactgggattaaccttttctgaagaaaagacctttaaggctgaagtggcttcgacctttttaaacggtgaaaaggtttattttgtgaaaccaacgacctttatgaatctatctggtctagctgttagagcattgctggcttattacaatattcccatggaggattttatcgttatttacgatgatttagatatggaagttgggaaattgcgctttcgtcaaaaaggttcagcaggtggtcataatgggattaaatctatcattgctgaaactggcactcaagaatttgaccgtataaaaattggtattggccgcccacagaaaggaatgacggtcgttaatcatgtcctgggaaaatttagtgaagatgattatgccacaattttactgactttagacaaggtagagacggccctcaatcattaccttaaaaccaatgatttcgaagacactatgaggcgttataatggctaataccctattagatctttttgagaagaatcctcaattgcttgagtggagtgataaagtaactttattgagtagacagttggttatgggattttctggttccagcaaggcagttgtcatggcatctgccctttctgagcaggttcctaagattctaatcgttacttcaacacaaaatgaagctgagcaactaacaggagatttgtcagctatcttaggagaggataaggtttattctttttttgcagatgatgtagtagctgcagagtttatcttcgcttctccagaaaagacccattctcgtctcgaaagtcttaattttttaatggataaagagtcaagtggaatcttggttacgagtttagttggtactaagttacatttgcctaaccctgaggtttataaagactctcgcattgacttaacactaggggaggaacatgatttagaggctctcagtaagcatcttactcatattggataccaaagggtagagcaggttctctcacctggtgagtttagtcgtaggggcgatattttagatatttatgaactgactgcagagcttccctaccgtttggaattttttggggacgagattgatggcattcgtcagtttgatagtgatagccaaaaatctttagacaatttagagcaagttatcgtatcgccagcagatgacattatcttgacaaaagaagattaccaacgtgctgagaatgctctagaaactgcgatttcgaaggtagagggagctcataagacctatcttgaagaagttctttcggttacgattgatggttaccgtcataaagatttacgtaagtttttatctctgttttatgataaagcttacaccttatttgactaccttccaaagggaactcctgtattcattgatgattttcaaaagatagtggaccgccatggacgtcttgagttagaagtggctaatcttttaactgaggatcttcatcagggcaagtctctgagtcatctaaattacttagtggattcatttaagactttacgtaactatcagccagctagtttcttttcgaattttcataagggattgggaaatcttaaatttgataagttgtatcaattcacgcaataccctatgcaagagttctttaaccagttcccacttctagttgatgaaatacatcgctataccaagaataaggcaacagttattttacaagtggggtctgagaagcagctcaaatctttgaaggaaaccttggaagaatatgatttagatttaccacttagtagttttggagatttgatacctcataagcctcagttagtcttaggaaacttatccaatggtttttactttgcggatgaaaagcttgttcttgtcactgaacgtgagatttttcataaaaaagtaaaacgtcgtgcgcgtgccagtcacgtttccaatgctgagcgtcttaaagattacaatgaacttgaaaaaggtgattatgttgtacaccagactcatggtatcggtcaatttaaaggtattgagactattgagattaaaggggtgcatcgtgactacttgaccatccaatatcaggatgctgcaacaatttctctacctgttgagcagattgagagtctctctaagtatgtatcagcggacggaaaagagcctaaaattaataaactcaatgatgggcgtttccaaaagactaaacaaaaagtaagcaagcaagtagaggatattgccgatgatctcttaaaactttatgctgagcgtagtcaacttaaaggttttgctttttcaccagatgatgataaccaaagggatttcgaagatgattttgcctatgctgagacagaggatcaattgcgttctatcaaggaaattaaggcagacatggagtcagacaaacccatggatcgtctcttggtgggtgatgttggttttggtaagacagaggtagctatgcgtgctgccttcaaggcagtcaatgatggaaagcaagttgctatcctagttcctacaacagttcttgcccatcagcactatttgaattttaaagaacgttttgaaaatcatgccgttgaggtagatgaactcagtcgttttagaagtaaaaaagagcaaaatgagactattgaaaatctcgctaaagggcgaattgatattattattggtacccaccgcctgctgtctaaagatgttaagttctttgacttaggcttgctagtaattgatgaagaacaacgttttggcgtgaagcataaagagaaacttaaggagctgaaggctaaggttgatgtccttacgctaactgcgacacctattcctcgtacgcttcatatgtctatgttaggtattcgtgatttgtcgattattgagacagcacctaccaaccgttatccagttcaaacttatgttatggaaactaatcctggtcttattcgagaagcgatattaagagagatggaccgaggcggccagattttttatgtttataatcgtgttgaaaccattgatcaaaaagtttctgaactacatgagctggtccctgaagcacgtatcggatttgttcatggtcagatgagtgaggttatgttggagaataccctcttggatttcttgaatggtgattacgatgttttggtagcaacgaccattatcgagacagggattgatatctccaacgttaatacgctctttattgagaatgcagatcatatgggcttatctactctttatcagttgagaggtcgtgtggggcgtagtaatcgaattgcttatgcctatctcatgtatcgtcctgataaagtgttgacggaagtctctgagaagcgattggatgctattaagggctttacagaactgggatcaggtttcaaaattgccatgcgtgatttatcaattcgtggtgccggtaacattcttggtgcttctcaaagtggtttcatcgactcagtcggattcgaaatgtactcgcaactcttggaagaggctatcaataaacgtcaaggtaaaactcaagttcgccgtaaaggaaatgcagagttcaatcttcagattgatgcttacctcccttccgactatatttctgacgagcgccaaaaaattgaaatttataagcgtattcgagaaattgagaatcagaaagactatcaagaccttcaagatgagcttattgaccgctttggagaatatccagaccaagttgcctatctcattgagattggtctggttaaggcctatttggatgctgcctttgcagaattagtcgagcgtaagaacgatactattattgttcgtttcgaaaaagcctctcttaaattcttcttgactcaagactatttcgaagccatctctaaaacgcatttaaaagcaaaaatcagtgataaccaagggaaagtagagattacttttgatgttcgtaacaagaaagactatgagattcttgaagaattaaaaatttttggacagacatttatggaaatcaaagaacgtaaagaaaaaaaggaagcttaaggaaagtttaagtaagtctctctatactataaaacatcctaaaacttttctttttcataaatctcctgagagggtcgactagtgtcgattctcttatttttgtacttgaaaaggctttagtcccctattttctcaaaaaaatgctatcatagaagagatatcctaacgaaaaggaaacagtaacattgagattagacaaatatttaaaagtatcacgaattatcaaacgccgtccagttgctaaagaagtagctgataaaggacgtataaaagtaaatggagtactcgctaagtcatctacagatttaaaaattggtgaccaagtggaagttcgttttggaaataaacttttaactgtccgtgttttagaaatgaaagacagtactaaaaaagaagatgcggcaaaaatgtacgagattataagtgaaacaaggattgaagcagatgagcaagaagcctaatattgtacagcttacgaacgattacattgataatgccaatcaagagcaacgattagagcgtgccgaacacgaacaaaggaatcgctttatggggtggattctttttgtggttgttttactctttatcttgccaacctataatctggttgagacctatatgaatatcaaacagcaagagaaggaagtcttgtcgcttcagaaagactatgataaattgtcggatcagacaaaggaacgaaaggatttggctaagaaacttaaggatgatgctttcgccgagaaatatgcgcgtgctaagtactattattcacgtgaaggagagtcaatctatcctgtaccaagcttattaccctaatgaaagatttacttaaaactgtagaaacttttttaacctattcagaagccaagttagaggaactatcagaaaaaaatcagcaacttaaaacggaattaccgaggaaagaggaggtgaagaagcaagcatgaaaaagctcttaatagctgcaactgttgtgcttgtatcttctagtcctctagtcttacttcctatggagaaggagctaactctgaccccaaaacaggtccaaaaattgactcaaaatactacagctagcttgactcaatttaaacagattcctaaaaatccaagaacgataacaactatcctaacttacaagaacaaggatttaacagaatttaaaaccagtatccaagcggataccaaactatcgatttctgctattttttggaatgctaaaggtgaacccgttttccaacttcaagatggtgattatgtagccgctagtcagaaatcaattgtagacgacagtatctataatcaaaaaccagtagatatgaccctctggactaaagatggttttacggtatacaaagaaccttacgttctaggaactgaaaaagctgactccaaactcgctagttttaaacccattaaggttagccaagcagctcagacgcatgcagggacctactatttggtagacggagaggggtggattaacgcttctgatttatcaacgactgacaatcgcatcgaggctgttcaaaaagtccttaatgagaagtataacaatcaagagcgcatctcagtttatgttaaacagcttgatacggaccgagtagctgctatcaatgacgaaaaaagcatgtatgcagcaagcgtagccaagcttggagtactctattatgcacaggaacgtctgtcccaaaagaaattatcattatcagatgagtatcaatatacctctgctgtaaatggttttccaggtgcctatgatccagatggttctggaaagattagtaagatgcctgatgataagaattatagcttggaaaatctgttaaaggctgtagcccaaaactcagataatgtagcgacaaatatattaggttattatgtaactaatcagtatgacaaggccttccaaaaatcagtagataaagccgcagcgacttcgtggaatatggataaaaaggagttgactgctagagccgcaggtactttgatggaggctgtttatagacaaaatggagatattatcacttatctttcaagtacggactatgatggcgaacgtatttccaaaaacattgatgttcccgtcgctcataaaattggtgatgcctacgactttaaacatgacgtcgctattgtttatgcagattctccctttattctatcgatttttacggataaagagggctatgacaaaatcacctcaattgcagatgatgtttatggaattttaaaataatgacacaaaaattgttgcaaatgatgcaagccaagggttattttaaccagcacaagaaaattttagtagcagtatcaggtggagcagactctatgagtttgctgcactttttgtataaccatcaaaaagatttggatattcagttggggattgctcacgttaaccataaacaacgacaagagtcggagcatgaagaagcgtatttacgtcattgggcagaggaacataaggtcccttttcactatagtgccttctcaggaaagttttcagaaaatgctgcccgtacctttcgctatgagttttttaagcgggtcatgaaagattatgattactctgctcttgtaacagcccatcatgcagatgatcaagcagagacgatttttatgagactgttgagaggaagtcgtttaagacacctgacaggaatttcagctatcagaccatttggcactggtcagattattcgtccctttttgcatcttacgaaagatcagcttcccgtaactttccattttgaagataggagtaatacgtcattagcctatcttcggaatcgcatcagactatcctatcttcctaccttatctcaggaaaatcctaaatttaaggagcacctttgtcttttagccgaggagattggtcttatgaagcaagctttaggggagttaacaaaggatattactatcactgatttatctgtttttcagcaacagtcagatcctgtccagctctttcttcttcagaactatttagatacctttcctgatttacagctttctaaaggccaatttaatcaattgataagttatctaaggaaaaatggttcaggaaagatccccctaataaatggttacgaactagtaaaaacacagacttctttcctaataaggaaagaagaggctatctctttatcccctccttgtctcttagaatttggaaaatctgttgagtttgaggattataccttgagtttttcagaattcaatgacgtttctaactcagatactattagtatttggtcagattccccaatagtgattcgtcatagaaaagaaggcgataagattgaccttggtagtcaccataaaaagttaagacgactatttatagacaataagattttagagaaggatcgtcaaaaagccattataggagaacaagatggtcagattatttttctttatgttgctgggcgtctctatttgaaaaaaagacctgaaaatgctatactttatggcactgtagtcatttataagaatttctaatcaaataccatgttcaaataacgatgattgaagtaaaagtggtataataacagaatattgacttcgagaaagggaacccaaatgttagaaaaagacattaaaaaagtcctcttttcccaagaggatatcgtagctaaaactaaagaactaggacaacaattgacagaggattatgcggggaaaaatcctctactagtctgtgttttgaaaggtgctgttccatttatggcagaacttatcaaacatatcgatacccatattgagatggactttatggtcgtttcaagttatggtggtggaactgtcagcagtggtgaagtaaagattcttaaagatgttgacactaatgttgaaggacgagacatcatctttattgaagatatcattgacacaggtcgtacgctcctttatcttcgagatatgttcaagtaccgtaaagccaattcagtcaaaatcgcaactctttttgataaaccagaaggtcgtgttgttgatattgaggcagattacgtatgttacgatgttcctaatgaatttatcgttggtttcggactagactatgatgaaaaataccgtaacctcccttatgtcggtgtcctaaaagaagaaatttatacaaaataagtaaaggtctaattaatttatgaataataaaaataataatggcttcttacggaacgcttttctctacatcatagttattattgcggttgtaaccggagtacaatactttgcaggaggaagccaaagcccaagtcaacaattgtcttacacacagttggttaagaaaattgaagatggtaaggtaaaatctatcacttatcagccagacggtagtatcattgaagttaaaggtagctacaaaaaggccgaaaaggttgatactgatcttagtctaccatttttaggtagtgcatcatcagagacacgtagctttacatcgactgtgctgcagaatgaaacaaccatgcagaaattgcagtcagcatcagaagcagctgatgttaatgttaaaatgatacgtgaaagttcaagtggtgcttggatttcatatctttttagttacctacctttgattgggattgctattttcttccttttcatgatgaatcaaggtggtaaccgcggtgcaatgaattttggccgcaaccgtgctaagactcaatcaaaagagaatattaaagttcgtttcacagatgtggctggtgcggaagaagaaaaagaagaacttgtagaagtcgtagatttcctcaaaaatccacgtaaatataaagcacttggtgcacgtatccctaagggtgttctccttgaaggccctccagggacaggtaaaactctgcttgctaaagctgttgctggtgaagcagatgttcctttctttagtatctcaggttctgatttcgtagagatgtttgtcggtgtcggagcaagtcgtgttcgtagtctttttgaagacgctaagaaggccgaacgtgctattatctttattgatgaaatcgatgcggttggccgtcgtcgtggtactggaatgggcggcggtaacgacgaacgtgaacaaacccttaaccaactgttgatagaaatggatggttttgatggaaatgagaatatcattgtcattgctgcaaccaaccgcagtgatgttcttgatccagccctcctacgtccaggacgttttgaccgtaaagttcttgttggtcgcccagatgtaaaaggccgagaagctatcttgaaagtccatgccaagaataaaccattggctgaagatgttgaccttaaagttgttgctcaacaaactccaggttttgttggagctgacttagaaaatgtcttgaatgaagcagccctagttgctgcacgacgtagtaagactagaattgatgctagtgatatcgacgaagcagaggatcgtgttattgctggaccatctaagaaagaccgccaagtttcagaacacgaacgtaaagttgtggcttaccatgaagcaggtcatacaattgttggtttaacactttctagcgctcgtgatgttcacaaggttactattgttccacgaggtcgcgcaggtggttatatgatttctctaccaaaagaggatcagatgttgtcatctaaagatgagctaaaagaacaattggcaggacttatgggtggacgtgttgcagaagaaattattttcaacgttcaaacctcaggcgcttcaaatgactttgagcaagcaacacagttagcacgtgcaatggttactgaatatggtatgagcgaaaaacttggaccagtccaatatgaaggtaatcatgcgatgaatccaggacaatttacgacagataagtcttactcagctcatacagctcaacttattgacgaagaaattcgatcacttttagttgaggcacatgacaaagcagctgaaattatcaatgccaaccgagaaacacatgctctcattgcagaagctttgcttaagtatgaaacacttgatgctgtacaaatcaagtcaatttatgagactggtaagatgccggaggattctcttggagattcagaagaagataatcatgccctatcttacgatgaagtcaaagaaagaattgaaaataaaaataaagatgaagaagagtaaggagttttactcttctttttttagataaatcgagagaagaaatactattaaaaagtattataaaaaaagaaaattaaaatcaatacaagttattgacaagacaagctagagatgatattataaataagctgtttcgggagagacagcggacacgagaagtaaaaaaacttcaaaaaagtgttgacaaggtattctagatttgctagaatatagaagttgtcttaagagagacaaagacctttgagaactgaataagaaaccaagtgcagggttatgatagaagaattataacctgtcaatttacaagaataaatcgtcagacgacggtaatgagttaacgctcgaacaattattaaattttttaatgagagtttgatcctggctcaggacgaacgctggcggcgtgcctaatacatgcaagtagaacgctgaagagaggagcttgctcttcttggatgagttgcgaacgggtgagtaacgcgtaggtaacctgccttgtagcgggggataactattggaaacgatagctaataccgcataacaatggatgacacatgtcatttatttgaaaggggcaattgctccactacaagatggacctgcgttgtattagctagtaggtgaggtaacggctcacctaggcgacgatacatagccgacctgagagggtgatcggccacactgggactgagacacggcccagactcctacgggaggcagcagtagggaatcttcggcaatgggggcaaccctgaccgagcaacgccgcgtgagtgaagaaggttttcggatcgtaaagctctgttgtaagtcaagaacgagtgtgagagtggaaagttcacactgtgacggtagcttaccagaaagggacggctaactacgtgccagcagccgcggtaatacgtaggtcccgagcgttgtccggatttattgggcgtaaagcgagcgcaggcggtttgataagtctgaagttaaaggctgtggctcaaccatagttcgctttggaaactgtcaaacttgagtgcagaaggggagagtggaattccatgtgtagcggtgaaatgcgtagatatatggaggaacaccggtggcgaaagcggctctctggtctgtaactgacgctgaggctcgaaagcgtggggagcgaacaggattagataccctggtagtccacgccgtaaacgatgagtgctaggtgttggatcctttccgggattcagtgccgcagctaacgcattaagcactccgcctggggagtacgaccgcaaggttgaaactcaaaggaattgacgggggcccgcacaagcggtggagcatgtggtttaattcgaagcaacgcgaagaaccttaccaggtcttgacatcccgatgctatttctagagatagaaagttacttcggtacatcggtgacaggtggtgcatggttgtcgtcagctcgtgtcgtgagatgttgggttaagtcccgcaacgagcgcaacccctattgttagttgccatcattcagttgggcactctagcgagactgccggtaataaaccggaggaaggtggggatgacgtcaaatcatcatgccccttatgacctgggctacacacgtgctacaatggttggtacaacgagttgcgagtcggtgacggcaagctaatctcttaaagccaatctcagttcggattgtaggctgcaactcgcctacatgaagtcggaatcgctagtaatcgcggatcagcacgccgcggtgaatacgttcccgggccttgtacacaccgcccgtcacaccacgagagtttgtaacacccgaagtcggtgaggtaaccttttggagccagccgcctaaggtgggatagatgattggggtgaagtcgtaacaaggtagccgtatcggaaggtgcggctggatcacctcctttctaaggaaaaacggaatgtacttgagtttcttatttagttttgagaggtcttgtggggccttagctcagctgggagagcgcctgctttgcacgcaggaggtcagcggttcgatcccgctaggctccattgaatcgaaagattcaagtattgtccattgaaaattgaatatctatatcaaattccatatgtaattaaatacatatagatagtaacaagaaaataaaccgaaacgctgtgaatatttaatgagttaggtcgaaagaccaaaataaggttaagttaataagggcgcacggtggatgccttggcactagaagccgatgaaggacgtgactaacgacgaaatgctttggggagctgtaagtgagcaatgatccagagatgtccgaatgggggaacccggcaggtaatgcctgtcactcattactgttaaggtaatgtagaggaagacgcagtgaactgaaacatctaagtagctgcaggaagagaaagcaaaagcgattgccttagtagcggcgagcgaaacggcaagagggcaaaccgaagagtttactcttcggggttgtaggactgcaacgtggacttaaagattatagaagaactacctgggaaggtaggccaaagagagtaatagcctcgtattcgaaatagtctttatacctagcagtatcctgagtacggcgagacacgagaaatctcgtcggaatctgggaggaccatctcccaaccctaaatactctctagtgaccgatagtgaaccagtaccgtgagggaaaggtgaaaagcaccccgggaggggagtgaaatagaacctgaaaccgtgtgcctacaacaagttcgagcccgttaatgggtgagagcgtgccttttgtagaatgaaccggcgagttacgatatgatgcgaggttaagttgaagagacggagccgtagggaaaccgagtcttaatagggcgcattagtatcatgtcgtagacccgaaaccatgtgacctacccatgagcaggttgaaggtgaggtaaaactcactggaggaccgaaccagggcacgttgaaaagtgcttggatgacttgtgggtagcggagaaattccaaacgaacttggagatagctggttctctccgaaatagctttagggctagcgtcgatgttaagtctcttggaggtagagcactgtttgggtgaggggtccatcccggattaccaatctcagataaactccgaatgccaacgagatataatcggcagtcagactgcgagtgctaagatccgtagtcgaaagggaaacagcccagaccaccagctaaggtcccaaaatatatgttaagtggaaaaggatgtggggttgcacagacaactaggatgttagcttagaagcagctattcattcaaagagtgcgtaatagctcactagtcgagtgaccctgcgccgaaaatgtaccggggctaaaacatattaccgaagctgtggatacctttataggtatggtaggagagcgttctatgtgcgaagaaggtgtaccgtgaggagtgctggagcgcatagaagtgagaatgccggtatgagtagcgaaagacaggtgagaatcctgtccaccgtaagactaaggtttccaggggaaggctcgtccgccctgggttagtcgggacctaaggagagaccgaaaggtgtatccgatggacaacaggttgatattcctgtactagagtatatagtgatggagggacgcagtaggctaactaaaccagacgattggaagtgtctggccaagcagtgaggtgtgatatgagtcaaatgcttatatctataacattgagctgtgatggggagcgaagtttagtagcgaagttagtgatgtcacactgccgagaaaagcttctagcgttaattatactctacccgtaccgcaaaccgacacaggtagtcgaggcgagtagcctcaggtgagcgagagaactctcgttaaggaactcggcaaaatggccccgtaacttcgggagaaggggcgctgacttatggtcagccgcagtgaataggcccaagcaactgtttatcaaaaacacagctctctgctaaatcgtaagatgatgtatagggggtgacgcctgcccggtgctggaaggttaagaggagtgcttagcaatagcgaaggtatgaattgaagccccagtaaacggcggccgtaactataacggtcctaaggtagcgaaattccttgtcgggtaagttccgacccgcacgaaaggcgtaatgatttgggcactgtctcaacgagagactcggtgaaattttagtacctgtgaagatgcaggttacccgcgacaggacggaaagaccccatggagctttactgcagtttgatattgagtatctgtaccacatgtacaggataggtaggagcctatgacctcgggacgccagtttcgagtgaggcgttgttgggatactacccttgtgttatggctactctaacccagataggttatccctatcggagacagtgtctgacgggcagtttgactggggcggtcgcctcctaaaaggtaacggaggcgcccaaaggttccctcagaatggttggaaatcattcgcagagtgtaaaggtataagggagcttgactgcgagagctacaactcgagcagggacgaaagtcgggcttagtgatccggtggttccgcatggaagggccatcgctcaacggataaaagctaccctggggataacaggcttatctcccccaagagttcacatcgacggggaggtttggcacctcgatgtcggctcgtcgcatcctggggctgtagtcggtcccaagggttgggctgttcgcccattaaagcggcacgcgagctgggttcagaacgtcgtgagacagttcggtccctatccgtcgcgggcgtaggaaatttgagaggatctgctcctagtacgagaggaccagagtggacttaccgctggtgtaccagttgttctgccaagagcatcgctgggtagctatgtagggaagggataaacgctgaaagcatctaagtgtgaagcccacctcaagatgagatttcccatgattttatatcagtaagagccctgagagatgatcaggttgataggttagaagtggaagtgtggtgacacatgtagcggactaatactaatagctcgaggacttatccaaagaaagtaactgagacatattgacaacgatttggtttcttgatacagtatagatattcaattttgagttgagaatactcagagttaagtgacgatagcctaggagatacacctgttcccatgccgaacacagaagttaagccctagtacgcctgatgtagttgggggttgccccctgttagatacggtagtcgcttagcgcatagggagtttagctcagctgggagagcatctgccttacaagcagagggtcagcggttcgatcccgttaactcccataggtcccgtggtgtagcggttatcacgtcgccctgtcacggcgaagatcgcgggttcgattcccgtcgggaccgtcaagtagaaatatttgagactcgttagctcagttggtagagcaattgacttttaatcaatgggtcactggttcgagcccagtacgggtcatatatgcgggtgtggcggaattggcagacgcaccagatttaggatctggcgcttaacggcgtgggggttcaagtcccttcacccgcattagaaaagttagccggcttagctcagttggtagagcatctgatttgtaatcagagggtcgcgtgttcaagtcatgtagccggcataaaatgcgaacgtagttcagtggtagaacaccaccttgccaaggtgggggtcgcgggttcgaatcccgtcgttcgcttgaggagccggggtggcggaactggcagacgcacaggacttaaaatcctgcgaaaggaaactttcgtaccggttcgatcccggtcctcggcataatataataatgagcacccttagctcaactggatagagtacctgactacgaatcaggcggttagaggttcgactcctctagggtgcatttttatcgggaagtagctcagcttggtagagcacttggtttgggaccaaggggtcgcaggttcgaatcctgtcttcccgatttatggcggtgtagctcagctggctagagcgtccggttcatacccgggaggtcgggggttcgatccccttcgccgctatatatatggatttcttggacctttagctcaactggttagagcactcggctcataaccgagcggtcgtaggttcgagtcctacaaggtccatatattaattataatatttggaggattacccaagtccggctgaagggaacggtcttgaaaaccgtcaggcgtgtaaaagcgtgcgtgggttcgaatcccacatcctccttataattaacgcgggatggagcagctaggtagctcgtcgggctcataacccgaaggtcgtaggttcaaatcctgctcccgcaatatggctcggtagctcagttggtagagcaatggattgaagctccatgtgtcggcggttcgattccgtctcgcgccatttttgttaagcgggtgtagtttagtggtaaaactacagccttccaagctgttgtcgcgagttcgattctcgtcacccgctttatttggatattttagccaagcatttgcttgggcgcgtagctcagatggttagagcgcacgcctgataagcgtgaggtcggtggttcgattccactcgtgcccatattggagaattactcaagaggctgaagaggacggtttgctaaatcgttaggtcgggtaaccggcgcgggggttcgaatcccccattctccgtagtattatgacgaattatctttaagataattcgttttctttttttgaggtgacaaaatgaaaaatagtttttatcgatttcttctttatgggtttattatttttctattttttgtaatgcttttttcttttgtctttactaataaaaaattaaccaaggatatctcgtctaatgtttcgggtttcgttaccaaagtagactcagtggtttcagttccatttactgctttatcaaaatctcataatgttatttctgatctcttatcaacctataatgagaatcaagatttaaaaaaatctttatcgaatttagaaaatcaatcatctattatttctaacttgcaagaagagaatgattctttaagagcttcgcttaatctttcggacaagctaagtcgtgatactgttctcactgctgaagtttctatgcgaccttctgtgacttggttaaaagagttaacgattaatgtcggtaagtctaagaatgttagtaaatctatgctagcaacttctaatggtggagtaattggttttgtaactaaggtatatgatgatactactactatttctttactttctagtagttctagtgatagttaccttgcttctagcgtcaaatcagaggatgataaccagattttcgggattatatctcgttatgataaaaaaaagaagctgttagagatgacacaactcaattcatcttctaacgttaaggttgggactgaagtagttacaagtggtcttgatgatgtatcagtaaaggatgttccaattggtactgtagactctgtgagtgattatgaaggaaatcgtacgattttggtaaaaccttatgctgattttgataaaatttcttatgttactttagttggagatggtaaataatatgaaattatccaagtattctattattcctttcttactgagtattgttccttttctatgggatggtcatatttcgatgatacttaatcattatttatctcctgaattttttctatcatctcatcttttcattatttatatttttatcttaactcttgattttccaaataagtattcctttctttaccttgtttgttttggatttctttatgatacctattatttcaaaacagttggtatagtaattctaactctgccgctgttatgctatctgttaactcagctaggtcgaattgttaagagaaatacctatgttgattttttgttaatgtttttattcctctttctctttgatactataaattttggctttgccttattttatggtttctccaatgagtctgtgacggattttattatttatcaactaagtcctagtatagtgtttaatcttttgacctttatctttattaaacctattcttgaaaaattatttttgtatctgtcagttgatagatttaaatagaactgtaatattggcgtaacaaagtttgcgccattttttgatacaattaataggtcttatcgaaaaggagtagtattttatattatgaaaaaacgtattctttcagcagtgttggtaagtggtgtaaccttatcagcagctgcatcagtacatgcagaggattatgattcgcaaatcgctgctgcagataacgcaattagtaaccttgcttctcaacaagagactgcacaagcgcaagttgctacaatccaatctcaagtatctacacttagaacacaaaaatcagaattggaaactaaaaatgctgaacttgaaaaagtatcagcagatttggaatctgaaattcaagaattatcaagtaaaattgtagctcgtcaagattctttggcgaaacaagctcgtagtgctcaacaaaataatactgcgactagctacatcaactctatcttgaactctaagtcaatctctgaagctattactcgtatcacagctatttcaaaagttgttacagctaataatgacatgttgacaaaacaagagtctgatcaaaaagagcttgctgcaaaacaagaacaaaaccaagctgctattaatgagattgcaactaataaggcagaacttgaaacaacagaagctggtttgacaactcaacaagcagaactagaagcagcacaagttgctttggctgcagaattggctacagctcaagatgaaaaaacatcacttgtttctgctaaatcaactgcagaagcagtggcagcttcaactgcagcatcagttgctcagtcacaagcaattgcagaatcagaggcagcagcacaagcagtagcatcttcagaagcggcagcatttgtagctcaatcagaggcggcagcaacttcagaagctgtagctcaaccttcagaagctactgtttcagaaatagcaacagcctcagaagcagtacaagaacctgtttcatcagaaacttcagaaactactcaagagccaactgttgcaacttcagaagcaacacaagagcctgaagcacaaccagaatcagctgctccagcaacatctgaagcaacacaagagcctgaagcacaaccagaatcagctgctccagcagcttcagaagcaccagctcctgctagcgaagcacctgcagcaacttcagaagcaccagcaagtcaagcacctgcagcttcagaagcaccagctccagcagctgaaacacctaaagtatcagctgcctcaactcctaatacatatcctgttggtcaatgtacttggggtgctaaatcattagcttcatgggttggtaattactggggtaatgctaaaaactggattgctagcgcacaagcagctggccactcagttggtacaactcctgtagccggagcaattgcggtttggccaaatgatggtggtggttatggtcacgtagcttacgtaacatcagcatcaggtgcaaattcaattcaagttatggaatcaaactatgctggtaacatgtcaatcggtaactaccgtggtacatttgatccaacatcttcagctcatggtggttctgtatactatatttacccataatgactacaagaaggcgattcgaattttctcgaatcgtttttattttatagcaaaatgtctttactttctggaattacttttagacgggaaaatgtcgaggttaaggttaaatctttttagtcttgttaagttactgtgacaccatttattttgcattgaaaatcaatctaaaaaaaggtagaatggtttagtagatattttggaggaaatcatgtcttatacgaatttgaagttgtttgctttatcgtctaaccaggaattagcagcaaaagttgctgataaaatgggtattgaactcggaaaatcaagtgttcgtgaattttcagatggtgagattcaagttaatattgaagaatctatccgtggtcatcacgtttttattcttcaatctacaagctctcctgtaaatgataacttgatggaaattttgattatggttgatgcgctaaaacgtgcaagtgcagaaacgatcagtgttgttatgccttattatggttatgcacgtcaagaccgtaaggcacgttcacgtgagccaatcacatctaaattggttgctaatatgcttgaggttgcaggtgttgatcgacttttgacagttgacctccatgcttctcaaattcaaggattctttgatattcctgtagaccatttgatgggtgctccacttatcgcagattactttgatcgtgctggtcttactggagatgatgttgttgttgtttctccagaccatggtggtgtgactcgtgcacgaaaacttgctcaatgtttgaaaacaccaatcgcaatcattgataagcgtcgtagtgttgataaaatgaacacttctgaggttatgaatattattggtaacgttgaaggtaaaacatgtattttgattgatgatatgattgatactgcaggtacaatctgtcatgcggctgatgcgcttgctgaagctggtgcaactcatgtctatgcctcatgtactcaccctgtattgtcaggtccagcacttgataatattcaaaaatctgctattgagaagcttgttgtattggacacgatttatcttccagaagaacgtttgattgataagattgaacaaatttcaattgctgatttgatttcagaggcaattattcgtattcatgaaaaacgtccattgtcacctttgtttgaaatgggtcataaatagactaaagctagcttgggctagctttttttggtgtttaaatgcgtttgagtttttgatataatgtaaggcataattgcaaagaggtgacagtgatggatttaacacaacgttttaataaaaatttagataagattgaagtttcgatgattcgtcagtttgaccaatcaatttcagatgtaccaggtatcaaaaagttgacacttggtgaacctgattttacgactccagatcatgtgaaagaagcagctaaagctgctatcgatgctaaccagtctcactatacaggtatggcaggacttcctgctttgcgtcaagctgcggcagattttgttaaggaaaaatataatcttacttataatccagataatgaaattttggtgactattggagctacagaagccctttctgcaactttgacggctattttggagccaggagatacgattcttttacctgcaccagcctatcctggatatgagccgattgcaaatctagttggtgctgaaattgttgaaattgatacaacagctaatgattttgttttgactccggagatgttaaaaaaggcaattttggagcagggagataagcttaaagctgttttgcttaactacccaactaacccaacaggtgtgacttactcacgtcaacagattaaagatttggctgaagttctgaaaaaatacgatatttttgttgttagcgatgaagtttactctgagctaacttatgtggaccaacatgtatctattgctgagtatctgccggaacaaacgattttgattaatggtttgtctaaatctcatgcgatgacaggatggcgtatcggtttgatttttgcacctgcagtcttgacggctcagttgattaagagtcaccagtatttggtaacagctgcagctactatggcacaatttgcagctattgaagccttatctgctggtaaggatgatgcccagccaatgaaagttgagtatttgaagcgtcgtgattatattcttgaaaaaatgactgaacttggtttcaaaattattaaacctgatggtgctttctacatctttgctaagattccagaaggctatactcaagattcctttaagttctgtcaagactttgctcgtgaaaaagctattgcgattataccaggggttgcttttgggaagtatggcgaaggctatgttcgcttgtcgtatgcagctagcatggatactattgaaacagctatggctcgtttgaaagagtttatggaagaacatgcagaagcttgagagtagagggcttgtcctcttcaatcgtaattatcgtgagaacgataagctagttaagatttttaccgagcaagctggtaaacggatgttttttgttagaggtggtgggtcaggtaaattaagtgctgtgattcaacctttaaccatcgctgaattcatgatgactgtaaatgatgagggcttatctttcatagaggattatagccaggcagagtccttcaaggaaattacaagcgatattttcaagctgtcttatgcgacttatttagctgctctgacggatgctgctattgctgacggtgtggcagatgcgcaattatttgcatttttggagaagacgcttgaattaatggaagaaggcttggattatgaaatcttgactaatatctttgagattcaggttttagaccgtttcggtgtacgattgaattttcacgagtgtgtcttttgccatcgtgtggggcttccttttgatttttcgtataagttctcggggctactttgtccaaatcactatgcagaggatgaaaggcgtagtcacttggatcctaatgtaccttatcttttagatcgttttcaggggctttcttttgaggaattgagaagcatatctgttaaggatgacatgaaacgaaagctacgacattttattgatgacctctatgataattatgttggaatacatcttaaaagtaagaagtttattgataatctaaattcttggggtcatattatgaataaagaagatagtgctgactagacattatcttctttttgtttcacgtgaaacaggaaagtaatggttttcagtctcaggggttaaaatgcaagtcagttcgtgctataataagaagataataagctgaaagactctgctagaaacagtgaactagtctattttagttacataatattttattgatagaaatctgagtttatgttttatggcagaggacaagagggagaatgctatgcatgtaattgcagtagatgctatgggtggcgataatgcgccacaagcaattgtagagggtgtcaaccaagctatagcagatttcaaagatattgaaatccagctttatggtgatgaagctaaaattaagacctatttgacagcgaatgaacgtgtgagcattgtgcatactgatgaaaagataaattctgatgatgagccagctaaagccattcgtaagaagaaaaaagcttcaatggtcttaggtgcacaggctgttaaggagaaaaaagcaggtgccgtgatttctgcgggaaatacaggtgcccttctggctgcaggtctctttgtggtcggacgtattaagggagttgagcgtccgggtcttatgtcaacaatgccaagttttactggtcaaccctttgatatgcttgatttgggtgctaatgcggaaaatacagctagtcatttgcatcaatatgctattttaggatctttctatgccaaaaatgtgcgtggaattggcaaccctcgtgtaggtctccttaataatgggactgaggaaacaaagggggatagtcttcgtaaggaggcttttgagctcttatctaaggagccaagtattaactttgttggtaatgttgaggcgcgtgaaatcatgtcaggagctgctgacgtggtagttgctgatggtttcacaggaaatgcagttctcaaggcaatcgagggaacgggacttggtgccatgaagactcttaagtcagctatcatgaatggtggtcttaaagctaagctaggtgctttcctattgaaagacagcttaaaaggtatgaaagagactatggattactctagtgctggaggtgctgttctctttggtcttaaagcccctgtagtaaaatgtcacggatctagtgatgctaaggcggtttactacaccattaagcaggttcgtacgatgcttgatactaaggttgtcgagcagctagttgaagcctttagtccaaaagaggaggctaactgatgagtagagtagaaattcttcagaaaatgcagctcgtaattcaagagcagatgggtaaagaggagattgttttaaccgaagacaccaaattagatgacttgggtgtggattcaatagagcttatggaattcattattaatttggaggatgagtttgaccttgagatttccgatgatactattgaccatatggttaaggtaactgatttgttggactatttgtctgaggaattgaataaaggataagaaatctagcaggaaggagttagattctaaatgaatatcataatatggtgactgagtattatagggttaccattttattggagtgaggcaagaaactaaatgttatatggatttagttctgtcacactccttttttctatacattgtttattaagaaactctaaaaaacaagcaaaacacgaacgatataattttatcgaagccacaaagtctgttatatattggtttttgtttttttgtgtggtataattagagagaataaacttgaaaggcgaacaattccatgtcaaacgaactaatttatactggtaaagctaaagatatttatagtacagaagacgaaaatgtgattaagtcggtctataaggaccaggcaaccatgcttaatggtgctcgtaaagagactattaaggggaaaggtgtgcttaataatcagatttcgtctcttatttttgaaaaattgaatgctgctggtgtagctactcactttattgaacgtatttctgacacagaacaacttaacaagaaagttactatcattcctttggaggttgtccttcgtaacgtgactgccggttctttttctaaacgttttggcgttgaagaaggtttggatttggaaactccaatcgttgaattttactataaaaatgatgaattggatgatccatttatcaatgatgaacatgtcaagttcttggacattgccaacgatgagcagattgcctatatcaaggaagaaacacgtcgtattaatgaattgttgaaagattggtttgcacaaattggtcttcgtttgattgacttcaaattggaatttggttttgataaggatggcaagattatcttggcagatgaattttcaccagataattgccgcctttgggatgcagaaggacaccatatggacaaggatgttttccgtcgtgatcttggtagcttgacagatgtttatgaagttgtattggaaaaattgcaaggattgaagtagccttttacaaatagaatacttggtcttcactacaatctttaagtagaaatagataaaggaaataaaatggataaacgtattttcgttgagaaaaaagctgattttcgtgtgaaatctcagtctttagtaaaagaattaaagcataatcttcagttgaaaactttgaatgatcttcgtattgttcaggtttacgatgtctttaatttggcagaggacttgtttgcgcgtgcggaaaaacatattttctctgagcaagtgacagatactgttttggatgaagctacggttaaggctgatcttgagaagtatgctttctttgctatcgaaagtttgcctggtcaatttgaccaacgtgcggcatcttcacaagaagctttgcttttgcttggtagttcaaatgatgtaacagttaatacagcgcaactttacttggttaacaaggatatcgatgcgaatgagttggaagctgtcaaaaattacctcttgaacccagtagactctcgtttcaaagatatcactgttggtattgctaaacaggatttctctgagtccgacaaaactattccgactttggatttctttgaaacttatacggcagaagattttgctaagtataaggcagagcaaggattggccatggaagtggatgaccttctcttcattcaagattacttcaagtctattggacgtgtgccaactgagactgagcttaaggttttggatacttactggtctgaccactgccgtcacacaacttttgagactgagttgaagaatatcgacttctcagcatctaaatttgaaaaacaattgcaagcgacttatgacaagtacattgccatgcgtgatgagttgggacgtacagaaaaacctcaaaccttgatggatatggccactatttttggtcgttatgagcgtgctaatggtcgtttggatgacatggaagtgtctgatgaaatcaatgcttgctcagttgaaattgaagtggatgtcaatggtgtcaaagaaccatggcttctcatgttcaagaacgaaactcacaaccacccaactgagattgaaccatttggtggagcggctacttgtatcggtggtgccattcgtgacccattgtcagggcgttcatacgtataccaagccatgcgtatctcaggtgctggtgatattacaacaccaattgctgaaactcgcgctggtaaattgccacaacaagtgatttctaaaacagcagctcacggttattcttcatacggtaaccaaattggtcttgcaacaacttatgttcgtgaatacttccacccaggtttcgttgctaagcgtatggagctaggtgcagttgtcggtgcggctcctaaggaaaatgttgtccgtgaaaaacctgaagcaggtgatgtgattatcttgctcggtggtaagactggacgtgacggtgtcggtggtgcgacaggttcttctaaagttcaaacggttgaatctgttgaaacagctggtgctgaggttcaaaaagggaatgccatcgaagaacgtaagattcaacgtcttttccgtaatggggatgtgacacgtcttatcaaaaaatcaaatgactttggtgctggtggtgtctgtgtggctatcggtgaattggcagatggtcttgaaattgatctagacaaagtgccattgaaataccaaggtttgaatggtacagaaattgccatctctgaatctcaagaacgtatggccgtagtggttcgtccagaagatgtagatgccttcgttgctgaatgtaacaaagaaaatattgatgctgttgtcgttgcgacagtaactgaaaaaccaaatcttgtcatgcactggaatggtgaaacaatcgttgatttggaacgtcgtttccttgatacaaacggtgtacgtgtggttgtagatgctaaggtggttgacaaggatgtcaagcttccagaagaacgtcaaacatctgctgaaacccttgaagctgacactcttgaagtcttggctgaccttaaccatacaagtcaaaaaggtttacaaaccatctttgatagctcagttggtcgttcaacagttaatcacccacttggtggtcgctaccaaatcacaccaacggaagcttctgtacagaaattgccagtccaacatggtgtgactacaactgcttctgtcatggcgcaagggttcaacccttatatcgccgattggtctccatatcatggtgctgcttatgcggtcatcgaagcaactgctcgtttggttgctgctggtgccaactggtctaaggctcgtttctcttatcaagaatacttcgagcgtatggacaaacaagcagagcgttttggtcaaccagtagctgctcttcttggatccatcgaagctcagattcaacttggtttaccatctatcggtgggaaagactcgatgtctggtacctttgaagaattaaccgtaccaccaaccttggttgcttttggggtaacaactgcagatagccgtaaggttctttctccagaattcaaagctgctggtgaaaatatttactacattcctggtcaagctttggcacaagaaattgacttcgaatttatcaaatctaactttgctcaatttgaagccatccaagctgaccacaaagtgacagctgcatcagctgttaaatatggtggtgtggttgaagctcttgcacttgcaacatttggtaaccatatcggagcaaatgtcgaattagctgaccttgacaatagcttgacagcccaattgggtggattcgtcttcacatcgcctgaagaaattgcaggtgttgccaagatcggacaaacagcagctgactttacacttactgtcaatgatgtaacgcttgaaggacacaaacttgacagtgccttccaaggtaaattggaagaggtttacccaacggaatttgcacaagcaactgagttggaagaagtacctgctgtagcatctgatgctgtgatcaaagctaaagaaacagttgagacaccagtggtttacatcccagtattcccaggtactaactctgagtacgattcagctaaggcctttgaaaaagaaggtgcgaaagtcaacttggtaccatttgtaacacttaatgaagaagctattgtcaagtctgttgacactatggttgacaatatcgaaaaagctaacattatcttctttgcaggtggcttctcagcagcggatgaaccagatggatcagctaaatttatcgttaacatcttgctcaatgaaaaagtacgtgcagctattgatagcttcatcgaacgtggtggtttgattattggtatctgtaacggattccaagcccttgttaaatcaggtcttcttccatacggtaactttgaagatgcaagcagcacgagtccaacactcttctacaatgatgccaaccaacacgtggctaagatggttgaaacacgtattgccaacacgaactcaccatggcttgctggagtagaagttggtgacatccatgccatcccagtatcacacggtgaaggtaaatttgtcgtgacagctgaggaatttgcagagcttcgtgacaatggtcaaatctttacccaatatgttgacttcgaaggtaaaccaagcatggattctaaatacaatcctaacggatctgtgaatgctatcgaaggtatcacaagtaagaacggtcaaattattggtaagatgggtcactcagaacgtttcgaagacggtctcttccaaaatattccaggaaataaagaccaacacctctttgcgtcagcggttaaatactttactggaaaataatagagtgccaagtgcactcagtaatgatatttttcaatgtagcagtagttctaaagagcttgaaaacttgagttcacattagtgaaatgagaggctaggaacagtttttcgtttgcataacattaggaaaatatcaaaaataaaaggtataaaaaatgacatacgaagttaaatctcttaatgaagaatgtggtgtttttggtatctggggtcacccggatgctgccaaattaacttatttcggacttcacagtctccaacaccgtggtcaagagggagcaggaattctctcaaatgatgcgggtcaattgaagcgtcatcgtgatatggggcttctctcagaagttttccgtgatccagccaacttggataagctaactggaacggctgctatcggtcatgttcgttatgcgactgctggtgaagcttctgtagacaatattcaaccattcatgtttaagtttcacgatggacagcttggtcttgctcataatgggaatttgactaatgcagagtcactaagacatgagttggagaaaaatggagctatcttaaactcaacttctgactcagaaatcttagctcacttgattcgccgtagccacaacccatcattcatgggtaaagtaaaagaagctctgagcactgttaaaggtggatttgcttatcttcttatgattgaggacaagcttattgcagctttggatccaaatggcttccgtcccctttctcttggtaagatgagcaatggtgctatcgtggtttcatctgaaacatgtgcctttgagggtgttggtgcagaatggattcgggatgtaaatccaggtgaggttgttatcatcgatgataatggcatcacttacgatacctatacaacggatacgcaattggctgtttgttcgatggagtatatctactttgcccgtcctgattcaaatatccaaggggtcaatgtccatacagctcgtaaacgtatgggtgctcaattggcacgtgagttcaaacatgaagcagatattgtcgttggtgtgcctaattcatcacttagcgcagccatgggatttgcggaagaatcaggcttgccaaatgaaatgggcttgattaaaaaccaatacacccaacgtacctttatccaaccaacacaagaattgcgtgagcaaggggttcgtatgaaactctctgccgtatcaggtgttgttaaaggaaaacgtgtggttatgattgacgactctattgtacgtgggacaacatcacgtcgtatcgttaatttgctaaaagaagcaggggcaacagaggtccacgtagcaatcggtagcccagcccttgcctacccatgtttctacggtatcgatattcaaacacgtaaggaattgattgcggccaatcatacagttgaggaaacacgcgaaatcattggagcggatagcttgacttacttgtctattgatggattgattgattctattggaattgacacagatgcaccaaacggtggcctttgtgtggcttactttgatggtaaatatccaacaccattgtatgactacgaagaacgctatttggaaagtttgaaagaacacacttctttctattaagagcagtgcagaagaaaaaagaggaaaaaattatgtctaaaaatgcttacgctccacgtctcactactgactaaaagctaaagcatttgtcagtagacactttgccctatggggtcaaagctagagacctgactagtatttttagataaaaagatggttcatctaaaaatacgtcgcactctttctcgaaaaaagaaaaggaataaataaaatgacaaataaaaatgcttacgctcaatcgggtgtagatgttgaagcaggttatgaagttgttgaacgtatcaaaaaacacgttgctcgtacagagcgtgcaggtgtcatgggagctctaggtggcttcggtggtatgttcgacctttcaaaaacaggtgtcaaagagcctgttttgatctcaggtacagatggtgtcggtactaaactcatgcttgctattaagtacgacaaacacgatactatcggtcaagactgtgtcgctatgtgtgttaacgatatcatcgccgcaggtgctgagcccctttacttccttgactacgtagcaactggtaaaaatgaaccagctaaattggagcaggtcgttgctggtgttgctgaaggttgtgtgcaagctggtgcagcccttattggtggtgaaactgctgaaatgcctggtatgtatggtgaagacgactatgatttggcaggtttcgcggtaggtatcgcagaaaaatctcaaatcatcgacggatcaaaagtagctgaaggtgacgtgcttcttggacttgcttcaagtggtatccactcaaatggttactcactcgtgcgtcgtgtcttttctgattacacaggtgaagaagttcttccagaacttgaaggcaaaaaacttaaagacgttcttcttgaaccaactcgtatctacgtcaaagcagctttgccactcatcaaagaagaattggttaacggtattgctcacatcacaggtggtggtttcattgaaaatgtaccacgtatgttctcagatgacttggctgctgaaattgacgaaagcaaagtgccagttcttccaattttcaaagcccttgaaaaatatggtgaaatcaaacatgaagagatgtttgaaatcttcaacatgggtattggtctcatgcttgcggttaaaccagaaaatgttgaacgtgtcaaagaacttcttgacgaacctgtttatgaaattggtcgtattgtgaagaaagatggcgcaagtgtggtgattaaataatggctaaaaggattgctgtatttgcctctggcaacggctcaaacttccaggtgattgcggaacaatttccagtagaatttgttttttcagatcaccgtgatgcctatgtcttagaacgtgccaaaaatcttggtgtggctagtcatgcctttgaactcaaggaatttgacaataaagcagcttatgaagaagctatcgtcaaactcttggatgaacaccagatagatttggtttgcttagcggggtatatgaaaattgttggcccaactttactagcagcttatgaaggccgtatcatcaatattcacccggcatatctccctgaattcccaggagctcatggtattgaggatgcttggaatgcaggtgttgatcagtctggtgtgactattcactgggtggattctggcgttgataccggtaaggtcatcagacaagtccgtgtgccacgccttgaaggtgatacccttgatactttcgaaactcgcatccacgaaacagagtacaagctctatccagaagtcttggatagtttgggagttgcacgaaaataagaaagccctagagctgaaagataatttttgactgtagcagctaaagaacttttttaaaaaaggaaaagaaagaaaatgactaaacgagcacttatttcagtctcagacaaagcgggcattgttgaatttgcccaagaactcaaaaaactcggttgggacatcatctcaacaggtggtactaaagttgcccttgacaatgctggggtagacactatcgccatcgacgatgtgactggtttcccagaaatgatggacggtcgtgtgaagactctccacccaaatatccatggtggtctcctcgctcgtcgtgacctcgatagccacctccaagcggctaaggataataatatcgaacttatcgaccttgttgtggtaaacctttacccattcaaggaaaccatcctcaaaccagacgtaacttatgctgatgcggttgaaaacatcgatatcggtgggccatctatgcttcgttcagcagctaaaaaccacgctagcgtaacagttgtggtagaccctgctgactatgctgttgttcttgacgaattgtcagcgaacggcgaaacaagctacgaaactcgccaacgtttggcagcgaaagtataccgtcacacagcttcatacgacgctttgattgcagaatacttcacagctcaagtgggtgaaacaaaacctgaaaaactcactttgacttatgaccttaagcaaccaatgcgttacggtgaaaaccctcaacaagacgcagacttctaccaaaaaggtttgccaacagcttactcaattgcttcagctaaacaacttaacggtaaagaattgtcattcaataatatccgtgatgctgatgctgctatccgtatcatccgtgatttcaaagatcgtccaacagttgtggctctcaaacacatgaacccatgtggtatcggtcaagctgatgacattgaaacagcttgggactacgcttatgaagctgacccagtgtcaatctttggtggtattgtagtccttaaccgtgaagttgacgctgcgacggctaagaaaatgcacggtgtcttccttgaaatcatcattgcaccaagctacacagacgaagcgcttgaaatcttgacaaccaagaagaaaaacttgcgtatccttgagttgccatttgacgctcaagatgctagcgaagtggaagcagaacacactggtgttgtcggtggacttctcgttcaaaaccaagacgttgttaaagaaagtccagctgactggcaagtggttactaaacgtcaaccaactgaaacagaagcgacagctcttgagtttgcttggaaagctatcaagtacgtcaaatcaaatggtatcatcgtgactaacgaccacatgacacttggtgttggccctggtcaaactaaccgtgtggcttcagtccgtatcgccattgagcaagctaaagaccgtcttgatggcgctgttcttgcttcagatgccttcttcccatttgcagataacgtggaagaaatcgctaaagcaggtattaaagcaatcattcaaccgggtggatcagtacgtgaccaagagtcaatcgaagcagctgataaacatggtttgacaatgatttttacaggcgtaagacattttagacattaatatttactataaggataccttaactaaaaagttagggtatttctttttaaatgtaacaagaatgtaaaatacaatatatagtgttcgtttttgtatttcacactatatattgtattttttattgtccttgtaagataaaaaataggtaaagtacttgacaactatgatataatatgaagtatagtgcatttatttaaggaggattatgaatcgagttacttgctttcattgtaattatgatgaaaagattattgagttcgttgaaaatcatcagcctataataagtgagcatccatttgataataattgggctgggaaaggaatgtatttttgggataattttgacaatgctaattattggaggggagaaaaaaggaaaaaaagtcctgcttcagtatctattgtttcagttgatgttgaatatgatacttcagacacatcctttttagatttaacaagtgagtctattttaaaaaaattgatagaatattataaactcactcatccagaggaaaatatttctgataaaaaaattggtgtattgattgatgattattctcatcagaatgatgtaaaagtaataaaattactaggagattataagcataataaatcaccaaatacaccaatagatatttctaaattatcatacaaagctaaagttatctattgtgtaaaagagaaaggtaaatctaacataatttttaattctattagaaagattgagggagagaaatgaataattttgaacgattagatgaattgataaataagctaaaaatggatactaattatcgagaacaagagataaaaagatttgctgagttagagcaaggattagtagaacaaaatagcagaggtagcttctatgactatgtagaatatgtgtttattaactctttatttgatactatttcaaaaatagagaaagaaaaatgtcaatttaatacagaaacatctctatataagtttataaataatccagtgaagaaagaatctcagcaaggtaaatttgaagaacatatagattcggaagaatataaaacatctgaaataattagaaaaaaaatggattatgataattcaggtacaaatgttgtattgggagtggctgcatgactaaaattaataaaaataagagtgcatttcaatttactaagcctatactaaaagaagctatattcttggatttgggtggaaaattgagtgagagtaataatcttttacaaacagatgttggtgaaattgaggaatttaatggagttaagtcagctacagtaagcctgactttagctaattttgaagaattaaatgattctgacaaggaagattttccctatttacttagggttacgatggagtcaaagtttaggtgggaaacaaataagatagatgactctgtagctgaaaatttacttagagtgaatgctccgtcactgctactttcctatattcgtccaattgtttcggggttgacagtggcatctgcttttcaagaagaagtggtaccatttattgattttacaaataatcaacagaattgatgtttagtattactctagtcgatttttacataaaacattgattggttattaaaaattagagccacataaactcatagagtcaatacgtatcataaatctcctaagagctcagcattagctgggcttttttatttcagtgcatcaaaaaaacaaccgttttcacgattgttcaatagatttaaactttttcaaggacagactgggttacccaagtattgcgatttccgatttggacgaggacgccatcgctaggtgggtcaatggctagcactttgaagttacctggaatagtaaaagtctcaccaggattgaggtactggtcagaagttggattgccttgtgcatcaacttcaagaacgggtccagggtcaacgatattgtgtttggttggtgtgcctccagctaaatcttggctagtgatggtatttcctgacacagacgtgacacggaaggttcctgtgaagcggacggtatcgccaactttgatagaagggttagtaggatttctattttgagctcctgaatcgaggtctttaaaatggatatagccagacacttgactcttatggaagctacgtttgtgatatttctcaggtccttgacccgcatcgtagttgtactcctcaatggttacctgatcaccatgaacttccgcaacccaagcgacatgtcccatgtgaccagctccattgactccagctgagaaccaggcgatacttcctacggcaggattcatatctacacggtgaccattggcacgtgcgatactgccccaagtgatggcatttccataacctattggcaaggtgaaaccgtttgtgttactgaggcgataggctgcaaaagacgtacactgacgccagtacatggtccaagggtcaacaccaaagcccccatatttccaagaggaagggtagtcatctccgaggacagccgcctgagcagagctgccgcacgaaaccgaaacagtcgctagacaagctagcggtaagagacaatttagtaattttttcttcattttaacctccacctacctattcgcagtttttcaggaaaatgaagatatttttgcgtttaagcctcccttaagctgttcagactagactctcaccaatcctaaataacttttttgataaacagtttactatttttaatagaactttaattaagttttggtatattgtataattcttttatcaataataaaatgagggacggataatgaatgtaaatataaaacaaaaaaagaagttgaagcatagacaaaaagaatacaaaaaaagtttgaagttcaataaagtcaagaaaagaggacatagtaagaaaagaaaagcttttcaacttagtgtattactaaacattttaccaataatattttttattatatataaaatatcagttcttattataaggagaattatattaactggtaatattgcttattcatcactatttatttgggaacaaatcttttatattctatattttatactatggtttattcctattgtttggataattatatcgatgtttgatggattagtaataattgaaaaatttaaatataaatccttttttatttatatatcagagttaatatttctggctctatctacaaatctaacattatatcctagtatttttgataggataatagggctaaacccaatctttattactctacgaataatatatgatataaaacaattgctaatacctttaattttactagcagtgccaactatagtagctaaggtatacataggatattcaagaatcaaaggaagaataccaactataatagaatttttattttggttgttccaatatatactgattatttttttagtttcatattcatatcttggtttaaccatatactctaaattattaattaacagttcaacttggctgaaagatgtgtctatggttttgagatcttcttactccataggtatggcagttttgatttttagtttctcagaattaattcaaacaacaattcttacccaaaaatataaattacaatatatattagtatcgtttttcaaagaaattagtccgaatctagttaatgtcacagtaacgtttctgacgatgctggcaacgctacaaaagaataatgtattgtttgcgttttgtctgatatctatgattgtaataaaagtttacttagcaaaatattattttcaatttttctattcatctattgagtcagttgttattttaggaatatcgacatttatgactgctcaattatcatcgaaacttgcatttgataatatcagagagttatcaatattaacgacaattttaattttgtttgaacttttctcatttatccttatatcgaaagttaaacgagatagaccgttatttagtgattttcaactattttataaactattaaagaaaaaaatgtcattcaaaaagttaacaattgatattttatcaggtatagtagtaacattcttaatatctaatagttttatttatatcatcttgatactaatattaagatatgttgtagatagatttaaaagtagtattaactatatttttgaaatagaagattctttttcggaaatactaaaatttgattttatttttttggttattttatttacaacaggttccaaagaagctgtagatattttaactggatatttattacctgcaatatggatgatggtaattaagataaccttaatgtatgattctctgctaaaaaatgacaaatagatcaatctttatcgctatactagagccgccttttttatgtccaaatttggatagacacccatatctccgaacaaatatgttataatggttatgtataattcgtgaaaattgctaatttttccgaataattgtcgttaacgggcatttgcccctagtcttatttgatattgaggtatctttcaaatgaaacttttggttgttggttctggtggtcgtgaacatgcgattgccaagaaattattggagtctaaggacgttgagcaagttttcgtggctcctggtaatgacgggatgacattggacggtcttgatttgatcaatatcggaatttccgaacattctaagctgattgactttgcaaaaatgaacgatattgcttggacctttatcggtccagatgatgcccttgcggctgggattgtggatgatttcaatgcggctggactcaaagcctttggtccgaccaaggctgcggctgaacttgagtggtctaaggattttgctaaggaaatcatggtcaagtacgacgttccgacagcagcctatggcacattttcagatttcgaggaagccaaggcctacatcgaggaaaaaggcgctccaatcgtcgtcaaggcagacggcttggcccttgggaaaggtgtcgtcgttgctgaaacggttgagcaagcaattgaagctgctcacgagatgcttttggacaataaattcggtgattcaggtgcgcgtgtagtcatcgaggaattccttgatggagaagagttctctctctttgcctttgtcaatggggacaagttctacatcatgccaacggctcaggaccataaacgtgcctacgatggtgacaagggccctaacactggtggaatgggtgcctatgcgccagttcctcacttgtcacagagcgtggttgacacagcggttgacactattgtcaagccagttcttgaaggtatgatcaaagaaggtcgtccttacactggtgtcctttacgcgggacttatcttgacagctgacggccctaaagtcatcgagttcaactcacgttttggtgaccctgaaacacaaatcatcttgcctcgtttgacatctgactttgcacaaaatatcaccgatattttggaaggcaaagagccagccatcacttggacggacaagggtgtgacactaggcgtggttgtagcctcaaacggctacccactcgcttatgagaagggtgtcaaacttccagccaagacagagggtgacatcatcacttactatgctggagctaaattcgctgaaaatggccaagatctcctctcaaacggaggacgtgtttacatgctagtcacaacagcagacaccgtcaaagatggccaaaacatcatctacaacgaactcgacaaacaaaacacagaaggcctcttctaccgaaatgacattggtagcaaagctaacaaataattggcgaccgtaggtcgaaaaaggcgagcgaaagcgagctaatgagcgacaatcaccactgttgtgaaaaaacgattggctaacacagccaatcgtttagggaaatcggaagacttaaggcttccgatttaggcatgagacaccttcggtggctgctgccgtccctcacaacctaaggtgattgtcaaaaaaaggaagaaaaaggatattaactatgaaaccagtaatttccattatcatgggctcaaaatccgactgggcaaccatgcaaaaagctgctgaagtcctcgacaacttcggtgtcgcttacgaaaagaaagttgtttccgcacaccgtacaccagacctcatgttcaaacatgccgaagaagcacgtagccgtggcctcaaggtcattattgctggtgcaggtggcgctgctcacttgccaggtatggttgctgccaaaacaacccttccagtcattggtgtaccagtcaaatcacgtgctcttagcggtgtagattcgctctattctatcgttcagatgccaggtggtgtaccagtcgcaaccatggctatcggtgaagctggtgcgactaatgctgccctctttgccctccgtcttctctcagtagaagacaaggccattgcggatgcgcttgctaactttgctgaagaacaaggaaaaatcgcagaggagtctacaaatgagctcaactaaaaccattggtatcatcggtggtggccagctcggtcagatgatggctatctcagctatctacatgggccacaaggttatcacccttgatcctgcagcagattgtccatcttctcgtgtatctgaggttatcgtggcaccttatgacgatgtggacgcccttcgtcagttggcggaccgctgtgatgttctcacttatgagtttgaaaatgtcgatgctgacggccttgacgctgttatcaaagacggtcaacttccacaaggaacagacctgcttcgcatttcacagaaccgtatctttgagaaggacttcctttcaaacaaggctaaagtaaccgttgctccttacaaggttgtgacatctagccttgatttggaagatattgacctttctaaaaaatatgtcctcaagacagcgacaggcggttacgatggccacggtcaaaaagtcatcacatcagctgatgatttggaagaggcaaatgcccttgctaactcagcagagtgtgtcttggaagagttcgtcaacttcgaccttgaaatttcagtcatcgtgtctggtaacggcaaggatgtgacagttttcccagttcaggaaaatatccaccgcaacaacatcctctctaaaaccatcgtgcctgctcgcatttctgatagtctagctgagaaagctaaagccatggctgtgaagattgccgagcaacttaacctctctggtaccctatgtgtggaaatgtttgcgacagctgatgacatcatcgtcaacgaaatcgcaccacgcccacacaattcaggccactactcaattgaagcttgtgacttttcacaatttgacacgcacatcttgggcgttctcggagcaccacttccagcaatccaccttcatgcacctgctgttatgctcaacgtcctcggccaacacgtcgaagcagctgagcgttatgtcacagaaaatccaagcgcccacctccacatgtatggtaaactagaagcgaagcacaaccgcaaaatgggtcatgtgactttgtttagtgatgaaccagatagtgtggttgagttcgggaaaggaattgatttttaggtgaaaatagcaatcctaggactcggagtcattggaacgacttatgcctatgcttttcaaaaagcaggtcatcaagtagaacatgtccttagagacagtaagcggaacaatgctcccaaatccctctcagttgatttgctagatggtcgctatcattccaagggtgaaaacaaacacgacacctatgaggttcatgtggcggaatctgttttggaatacgattttatttttctcagtgtgcgtcatggttttatcaaagaagccgtggaaaccttgcgaaaaaataatatcaaaggcaccctcgttttcttctgcaatttctggaatacacgaaaagatgtccaagagtgggcaggagattacgactatattctagcctttccgacagcgggtggtcacatgcaggaagaccatttggatggtgtcttgtttgaccatttaatgctagaaggtgagcaaaaggcacacatttctaactattctgatttgacgactttgctgagttctgcagatttgaagtgggaagttcctcatgatatggtcgagtggatttggattcacatggcgattaatgcgggtgtcacttcgacagctgcacgttcggggaatctggaaaacccagaagaattggctttgaacttgatgaatagttcttcggaattatcattagccatcaaggccattcgagaagctttgaaagtcgtagaagcgcgtggtgtaaatttgaagctttacaaagccgaactcttgccatacaaaattcccgcttggattgcaggaaaagccatgaaaatcatgtttgcgaaaaatgagctgacacgaaaaattatgactttgcacaatgataaacaggacatcttctattgttgtcaaagtgtctatcagactggtcaggagttaggtattgagatgcccattctggaagcaaatatgaagggaatttcgatttaggagattttatgattcaactcatcgtcaacgcatttgttgaaaaagataagactggagcagtcgtcgaagtcttgtatgctagtagcaatcacgaaaaagtgagagctaagtatgaagagttggttgctcaatatcctgaaaactatttagctatctatgatttgccgatggatactgatttgaataaactagatcactatccatcagtgtggattgggaaagaagaatttgaataaagcgacagtcggttgctaactgatgtaaaacatcaaaagaatattgcatataaaactaaaaaagaagcggacataggattccattaatttgagctcaaacgtccaatctttgatagaataaataaaaaaaagaaaggaacaagggtactcgtattcactaaaactgaatactggctacggatttggtcaaaaagataatttttcctagaagctgacgcttcttcgtctaaactcctattttgactgtgtccgcttaacgcccttaatatcttaattatgatcgaacgttattcacgccctgagatggcgaacatttggactgaagagaataaataccgtgcttggcttgaggtggaaatcttggctgacgaagcatgggctgagttgggagaaattcctaaggaagatgtggctttgattcgtgaaaaagcggactttgacatcgaccgtattttggaaattgagcagcaaactcgtcacgatgtggttgccttcacacgagcggtttctgagactcttggtgaagaacgcaagtgggttcactatggtttgacatctactgacgtggtagacactgcctatggttacctctacaaacaagccaacgacattatccgcaaggatcttgaaaacttcctcaacatcattgctgataaagcgaaagaacacaagttcactatcatgatgggtcgtacccacggtgtgcacgctgagcctacaacttttggtcttaaattggcaacttggtatagcgaaatgaaacgtaacattgagcgtttcgagcatgcggctgctggtgtggaagctggtaagatttctggtgcggttggtaactttgccaacatcccaccattcgttgaaaaatacgtctgcgacaaattgggtatccgtgctcaagaaatctcaacacaggtgcttcctcgtgaccttcatgctgagtactttgcagttcttgctagcatcgcaacttctatcgagcgtatggcaactgaaattcgtggtcttcaaaaatctgaacaacgtgaagtggaagagttctttgctaaaggtcaaaaagggtcttcagcaatgcctcacaaacgtaaccctatcggttctgaaaatatgactggtcttgcgcgtgttatccgtggtcacatggtaacagcttatgaaaacgtagccctttggcacgaacgtgatatctctcactcatcagctgagcgtatcatcgcaccagatacaactatcttgattgactacatgctcaaccgtttcggaaacatcgttaagaatttgacagtcttcccagaaaacatgatccgcaacatgaactctacatttggtcttatcttcagccaacgtgccatgcttactttgattgaaaaaggtatgacacgtgagcaagcttacgaccttgttcaacctaagactgcccaatcatgggataaccaagtagactttaaaccacttcttgaatcagatccagaggtaacatctcgtctcactcaagaagagatcgacgaaatcttcaacccagtttactacactaaacgtgttgatgaaatcttcgaacgcattggtttgggtgactaatctaaacaaaataacagaaagcaggtttgccctgctttttttgatggtgacatttatgtcactattttttgtttgatggagaaattataataataacatagcttgagagaataccaacgagctagcgagtggaaagaataatgacactcgttgttataaaaatagaaaaggagaattgaatggtattgaatttagaaaatgtaaactgtgttactcttcaagatgaagaattaatgatggttaacggaggtctcgcaccgattgttattggtggagttgtcgtaggttggaaggtcattggtggagtggcaggtgttatagcagcaagtggtgctgcagggattgctgcaggatattatgctaatcgtccgtaacattcaagaatcgttggaggctgacaatgtttaaagagcttataaaatatctaccagagttaattattcttttaatgagcctgctctataatattgcacgaatgatgagtgatttgggttatattaaagttccatcatggatgttatccatcgatgttccaaatatatcattgctcttaatcttgattatattaattttgaaaatgctaggagaaaaagatgtctaaaaaatatgagttgactaaaaaagaattgcaggaaattgaaggtggtgttgcaccaattatggttgctattggtttaggaagtctagcagtagcatcatttagttcaggatataaatttggaacagatttagctagacgtggacgataggtgacagaatcattctgtgaaagtggtattataatttcacattatatggtttaccgctttaatttagaagcgttatctttaaggtggttttaagtttattaagatatagtataaccatcctagtaaggcagctagcttttgtgagctagagataacataatttttttcataacaaatctccccaaagaaagtctagaatctaggcttttttcctctttttgaggttttattaggatattttaagaaaatacttgaaaacccttccaaaacaaggtaatatagttatataaagattctattggacaagcggtcaccttggaggattaggaagaagaggttgggaagcctgtacaatcgtatcttttcagcggtctttggactactgtgaaaatcccttaggggatttttttctgagatttaaggtttctttaaggaagtcaggttatacttcaggtctcctaaataacttttactgaacgttgttcagtaagtctcgttggcttacactttttgtagaacaacgaacttttctttttcataatctccaaaagagctccacacgctgtgttgggttctttttttgggcaaataaaaaaacgcccttaggcgttttgaatatggcttacatctcgtctggagcttcaacaccgagaaggcgaagggcttctttgaggactgttgctgttgcgtagcaaagagccaaacggctgtcacgttctggactttcgtccaagatacgtgtgtgcgcatagtatttgttaaaggcttgagccaagctgatagcaaatttagcaacgatagatggctcaaagttgtctgatgcacggttgatgatacgtgggaagtcttggatgagtttgatgatttcccagctttcaacgtcgtttaggctgtatgtagcatctgcagatggcgtgaagttggccttgcgcaagatagattggatacgagcgtgtgcatattgaacgtaaggtccagtttctccctcgaaggataccatggcatcaaggtcgaagtcgtaaccattcatacgatctgttttaaggtcgtagaatttgatagctccgacaccgacagcatgagcaacagcttccttattaggcaagtttggattcttagcttcgatttgagcttgggcacggttaacagcttcagcgatagttggctcaagcaagataacgttacctttacgagttgacaatttcttaccgttcttagttacaagaccaaaggcaacgtgagtcatgtcgtcagaccagtcgtagcccatttctttaagaacagctttcaactgtttgaagtgggcagattgttcattaccaaccacatagatggctttggcaaagtcgtaagtacgtttacggtagagggcagcagccaagtcacgtgtgatgtaaagtgtcgcaccatctgattttttgatgagggctgggtgttcgataccgtatttttcaaggttaaccacttgggcaccttgagattcttggagaagtcctttttctgtcaagatgtcaacgacttcatccatcttatcattgtagaaggcttcaccattgtagctatcaaaagaaacaccgagttcatcgtaaagacggttgaattccaccaagctttcgtcacggaaccattgccagagggcagttgcttcctcgtcaccagcttccaatttacggaaccattcacgagcttcttcgtctacagatgggtcttcttcagcttcggcattgatgcgcacataaagttgaaggagttcgttgatagggttagctttcacggcttcctcgctaccccatttcttataggcaacaatcagcataccaaactgtttaccccagtcacccaagtggttgatacggactggtttgtagccttgtttagctacgatgttggcaagagcatcagcgataactgttgaacgcaagtgaccgatagagaaaggtttagcgatgttaggactagacatatcaaaggcgatgttacgtccgtgaccgatgttttggtcagcgtagtggctgccttgagcgataacttgtccaagaacgtccgctgagatttttgatttatcaaggaagaagttgatgtaaggaccaacagcttcaactttttcaaagtttgaggcatcgattttttcagcgatgtctactgcaatcatttgaggagccttgcgcaagactttagccaatgagaaggcaggaaaggcgaggtcccccatgtcagcatttttaggggtttcaagcagattttgaatgttttcttgttccaattcgggaacaactttggcaatttctgctgcaatgagttctttagtattcataggtactccatttcaaatcttgtcattcatacctattttaccattattttagttaatagggtagggacaagaaagcatcaattaggaagtatttcatgaaaaaatacaaaaattctgttataatatgcaaagaatatacataaaaagaggaaagataatgaagagagatcgtcaagctgttatcaaacagatgatttcaagagataagattgggacacaagaggaaattaagcaacgcttagaggcggaaggtatcacggttactcaggctaccttgtcacgtgacttgcgtgagattggcctcttgaagcttcgtgatgaagaaggaaaactctactatagtttgtctgagcatgtgcttccaagtttggatcctacggttaaggactatgtcaaatcagtttcccgtgcccagtttatgttggtccttcacacagagttgggtgaagctgatgttttggccaacttaattgatagtgatggcaaccctgaaattttaggaactgttgctggcgcagatactctattggtaatctgtaaggatgctgtggttgctgaaaaattggaaagcgagtttcactgatgaacactcctcatcaggatctccaagaagccaaagaagagttaattgacctcctcaaacaccatgaggcggttcttgcttttcaagaggctgagaaggccattggacaggtacctcaaatcagtcatctggctggacagatgaaggcttatcaacaagaagcagtgctttttcaaaagattgagaaacaacgtgcctatgaggaggcaggtgagcaagcagatttgattcagcatgagttggaaaatttgcctattgttcaggactaccgtcaaaaaatgcaggatgccagtgacttggtccaatatgtgaccaagtctatcgaagaaaggattaacgaggagttaagacatggctaaggaaaaaatatctccaggaatgcagcagtatttggatatcaaggaaaattatccagatgcttttttgctctttcgtatgggtgatttttacgaattattttacgaggatgccgttaaggctgcccaaattttggaaattagcctaaccagtcgtaataagaatgccgataatcctattcctatggctggtgttccttatcattcagctcaagcttatattgatgtcttggttgagatgggctacaaggtagccattgctgagcagatggaggatcctaaacaggctgttggtgtggttaagcgtgaggtggttcaggttatcacgccagggacagtggttgacagttctaaacctgataatgccaacaatttcttggtagccattgacaaggctggaagtcgttttggtctggcctatatggatgtgtcaacgggtgaattttttgcgacagagttggacgatttcagttcagtttgtagtgaaattcagaaccttaaggcacgtgaagtagtggttggttatgatttacctgaagctgatgaacaagttttggtgaagcaactcaaccttctactttccaaggaaacagaggtttacgatgatgtccacttgattgacactagcttgacagacttggaaagcagtgtagcgggtaaacttctccagtatgtgcaccgtactcagatgcgtgagctcagccatttacaaaaggctcagcactatgagattaaggattacttgcagatgtcttatgcgaccaagtcaagtttggatttgttggaaaatgcgagaacgggcaagaaacacggttctcttttctggctcttggatgaaaccaagacagctatggggatgcgtctcttacgcacttggattgaccgtcctttagtgaatcaggctgtaatcatggagcgccagaatattatccaagttttcttggacaatttcttcgagcgtagtgacttgactgagagtcttaaaggggtttacgatattgagcgcttggctagtcgtgtttccttcggaaaggctaatcctaaagatttgattcaactaggtcataccttagctcaggttccggtcattaaggcaattttggagtcttttgatgatgaggccttgtcacgtcttttacaagagttagatgctctgccagaattagagagtctgattcggtcggctatcgatcccgatgctcctgcaaccattacagaaggtggcattattcgtgctggttttgatgagaccttggacaagtatcgcaaggtgatgagtgaggggacgtcatggatcgcagacatcgaagccaaggaacgtgaagcgtctggtattacaacactaaaaattgattataaccgtaaagatggttattacttccatgtgaccaactctaatcttagcttggtccctgaccatttcttccgcaaggcaaccctgaaaaattcagagcgctttggaactgctgagttggctaagactgaaggtgagatgcttgaggcacgtgaaaagtcatcaacgctagagtatgatattttcatgcgtgtccgtgagcaggttgaacgctatattgaccgtttgcaatctttggctaaggctattgcgacagtcgatgtacttcagagtttagcagttacagcagagactaatcattatgttcgtcctgtgttcaatgatgagcatcgtatcgttattgatcaaggccgtcatgcggtggttgagaaggttatgggcgttcaggaatacattccaaacacgattacctttgacagtcagaccaatgttcagctcatcacaggaccaaatatgagtggtaaatctacctatatgcgtcagttggccttgtcagtcgttatggctcagatggggtcttacgtgccagcagatagtattgatttgccagtttttgacgccatctatacacgtattggtgctgcagatgacttgatttcaggtcagtcgaccttcatggttgagatgatggaggctaaccaggccattaagcgggcgacacctaattccttgattatttttgatgagttgggacgtgggacagccacctatgatggtatggctttggcccagtctattattgagtttattcatgacaaggtgggggctaaaaccatgtttgctacccattatcatgagttgacagccctgtcaaatactttgacacaccttgtcaacgttcatgtggcgacacttgaaaaggacggagaggtgactttccttcacaagattgtcgatggcccagccgataaatcttatggtattcatgtggctaagattgcaggtttaccagcagatttactggaacgtgctgacaccatcttgacacaattagagggcgagacagttaccatccaacctcaggaaaaggtatcgcctcaagagaagccagccactgaaaaacatgtcaacgagcaaatctctctctttgatgattttactgaaaatccggttcttcaagagttacgtgatttggatatttacaatatgacaccgatgcaggtcatgatggctgtagcagatttaaaacagaaactataaaagaagcttgtcgattgacaggcttcttgtcttttataggtgtttcaattcttggttgagttgttcaatatcctttttcattttccaataagagaagacccaaacgaggagatagataaagctgaattcaatgactagctccaagtagaaagttaaacgtagagggaaccatccgctgagggtagctagtggaatgaaacctagacaggtcaaggcgtagtgagtgagagttgcacgaagcaaactccattcagccttacggaaaatataactagcgacttcaaagaggataccgatagcaaaccaagtgatgaggcagtaggccaataccaaagatccgtgaacctgatgtgacgtcatccattgtccaatagctgaatgaggattaagaggcatgtagcttggtgcccagataagagacataatcatggatacgacaagtccgataaggatgccctttgtgcctgatttaaaaagttgctttttcattgtaatttctcctttattgctttgaggtaacggcgtgatgagtaggtggtttccttgtttttaaggtgaatttcaacgaggccgttaggggtaatgttgaagcgttcaatttctttgaggttgacaatctctgattgtgagattttgataaagtaagatggcagtttttctaaaacttgatagagacgtaagcctaagtggtactctccttgaatagtttcagctagaacttgacgattttcgatgtagattctggaaatagcattagactcgatgaaataagtttcgccatctttttttcctttgagtcgttggttatcatccaaactttcgacaaactcgaccacttgctgaatcttgggcgtccgactaggtgcctgaatctgcaacatttcttcttgaaataccgagtcaatctgaacttttattttcataactatcctttcttattggtaattgaggaggcctcctccctttcacacctttattaaacactatttactagtccacagcaatagcgtttgtctatgtggtcctatgtggtgtctaagtggttgaaaatattttcgaaaacccctatacttaatgaaaacgtactgacgaggtaatcacatgaaatctataatgaaatggctagcaggaatttttcttgcctgcagtctgattttgagcttttttacaccttttgaaaaggcactaacactgaacttgctcttgctttatttctttgtgaagcagtttatggattcgacaagctcacccaaaacctaccaatggattttccaagtcatctatctcttgattttttctgggctcatttggttcaaccttcgtcatggggatatgattgttatagccacagccttatcttggctaacagttgtgtgtgagttatggctttataggaagcatcagtaacagttagaaacaatgatctctcaaccttttagaagggaaaataataattatgccaaaaatcatcgaattacctgaggtgttagccaaccagattgctgctggtgaggtcgtagagcgcccagccagtgttgttaaagagttggtggaaaatgctattgatgcaggcagcacccagattaccattgaagttgaagaatcaggcctctcaaaaattcaaatcacagataatggcgaaggaatggctcaagctgatgtggccatgagtttgcgccgtcatgcaacaagtaaaatcaaaaatcaaggagatctctttcgtattcgaacccttggttttcgaggtgaggccctaccatcaatagcttctatcagccacctaactattgtgacagcagcggatggagaagcctatgggactaaactggttgctaaaggtggagaaattgagagtcaggaccctatttcaacaccagttggaacaaagattaccgttgaaaacctattttataataccccagctcgtctcaagtatatgaagagtttacaggctgagttggctcatattgtcgatgttgtcaatcgtctgagtctagctcatcccgaggttgcctttaccttgcttaatgatggtcgtcagttgacacagacatcaggtactggagacctccgtcaagctattgctggtatttatggtttgacaacggctaaaaaaatggtggagatttcaaattctgaccttgattttgaagtttctggatatgttagtctccctgagttgacccgtgcaaatcgtaactacatcacgattctcattaacggacgttatattaaaaacttcctgcttaaccgtgctatttttgatggttatggttctaaactcatggtaggacgcttccctattgcggttattgatattcagattgatccttatttggctgatgtcaatgttcacccaaccaagcaggaagtacgtatttctaaagaaaaagagctcatggcccttatcagctctgccattgctcaaagccttagagagcaggatttgattcctgatgcccttgaaaatctagccaagtctagtaccagaggtgcagctaagccagttcaaaccagtcttccactcaaacaaaccaatctttactatgatagcagtcgtaatgatttctttgtcaaaccagagacagtccaagaagatatcaaacctcttatatcggagtcagagtctccagtttcattggtagaaaacaaaccgcaaccttctgttaaacaggcacagcgttcagcagatgaaggtgatagcgaacacgaaaaacttgattataaaaacaagtcgaaaatgaagcgcatgcttgaaactctggacaatgaggaaacatcaaccttccctgaattagagttttttggtcaaatgcatggaacctatctctttgcgcaaggacaaggcggactttacatcattgaccagcatgctgcccaagaacgtgtcaagtatgagtactatcgcgaaaagattggtgaggttgacagcagtttacagcagcttttggttccctatctctttgaattttcaggttcagactacattagtttacaagaaaaaatgtcccttcttaaccaggttggtatctatttagagccttatgggaacaacactttcattcttcgtgaacatcctatctggatgaaggaagaagagattgaatcagcggtctatgaaatgtgtgacatgcttcttttgacgaatgaagtgtctgttaagacctaccgtgctgagttggccatcatgatgagttgtaaacgttcaatcaaggccaatcatgctcttgatgattactctgcgcgtgacctcctagtacagcttgcacagtgtaaaaatccctacaattgccctcacggacgtccagtacttgtcaactttaccaagtctgatatggaaaaaatgttccgtcgtatccaagaaaatcatacgagtctacgtgacctagggaagtattaaaactttttttggtcttgctttacgaataggaatgttagatttataatagtggtgaagatgaggaatcttctaatgttttagcggattattgtaggatgattgcctgatttttaagttaggaggtatagtgatgagacacctaacaaaaactaataaacactttttacttgttgacttaacatttttagcgactagcttgattttctatattttggcctggttaggtcaaccaagtttggagaatactctcgtaaatgtttctagcattgcctttactttaggcgttgtaacatatattctattaggtctaaagatgattacagatactttaaagacgagtagtcatccttaaaatagagcaaacagaatccactttcgagtggattttttgttacaatagtacagcagtgcttgagatgacaaaataaacactcaagacaattatcttacaagtataaaatgataaagcaaaccattgaagaaacgaacgagaaaggaaatcacacgccatgtatgattacatcaagggaactctagtgaaaattaccgccaagtatattgttatagaagcaaacggcttaggttatattgtcactgtagcgaatccatatagtttttctgaccaaatgaatcagactatccaagtctatcttcatcaggttattagagacgatgcccaccttctttttggtttccatactgaagatgaaaaagaggtcttccttaagcttatttcagtttctggaataggtccgacgactgccctagccattgttgctgtagatgataatcaaggcttggttgctgctgttgataatagtgacatcaagtacttgatgaagtttccaaagattggtaaaaagacagctcaacaaatggttctggatttggcagggaaatttgcagagttaccaacagaaacgaccaagacgacaccaagtcaacctgaagggaatcatcaattggatgaggctatggaagccttgattgctcttggttataaagccacagaacttaagaaaatcaaggccttcttcgaaggaactaatgaaacggcagagcaatacattaaatcggctcttaaaatgttgatgaaatgaggtaagcaatggtcaatcgttgtcgttgggttccaacaaacaataaattatattgtgattatcatgacaaggagtggggaaagcctattggtgacgaccaaaaactttttgagctgctttgcttagaaagttatcagtcagggctttcttggttaaccgttttaaataaaagacaggcctttaatcgtgtttttcatgactataatattgagcgtgttgcccagtttagcctaagtgaacttgaagatgcgcttcaaaatccagacatcattaggcacaaacttaagctagaagcaaccgtaaataatgccaaacaagtactaaaaatccaagatgaatttggctccctgtcccattatttttggcatttctttgacggaaagcccttgataaataatgtacccacatataaggacgtcccatcatcaactgctttatcccaacagattgccaacaatctaaaaaagagagggttcaaatttttaggaccgacaactatatattcatttttacaagccgcaggatttgtgaatgatcatgaaaataactgtgacttcaaataaatgagtggatttgattgacaagacgagcaaaacatgttagtttataaacgaacatgtttttgagattattttacgaatagtaatataggtgaaccaatgaaagctgaattgattgcagtaggaactgaaatcctaaccgggcagatcaccaataccaatgcccaatttttatctgagaaactagctgaactaggaattgacgtgtattttcacacagcagtaggagacaatgaaagccgcctactttcagttcttgatcaagccagtcagcgtagtgatttagtcatactttgtggtggacttggccctactgaggacgacctaaccaagcaaaccctggctaaatttttaggaaaagaactcgtttttgatgaggaggctagtaaaaaactggatagtttctttgctactcgtcctaaacacacacgaacgcctaataatgaacgtcaagcacaaattgttgagggggctattcccttgcaaaacccgacaggtcttgcagttggagggattattactgctcaaggggtgacctatgtagtcttacctggtccaccaagtgaactcaaacctatggtgaatcaagaacttattccagctcttactgagaatcactcaagtctttattcgagagtcctaagattctttggcgttggagaaagtcaattagtgactattctgaaagagtttattgttaaccaaacagatccaaccatagctccatacgctaaagtgggggaagtaacacttcgcttgtcaacgaaggcttcttcgcaagaagaagcagatcaaaaactagatgttttagaaaaacaaattcgttcgactaaaactctagatggcaaatccttatctgatttcatttatggatatggagagtctaatagtttagcctttgaagcttttcgtttgcttaagcaccatggcaagaccatcactgcagctgaaagcctaacagcaggtttatttcaggctactattgctgatttttcaggagcctcacaagtatttaaaggtggctttgttacttacagcattgaagaaaaagctaaaatgttgggtattcctttgtcgcaactagaagaacatggtgttgtcagtcattttactgcagaaaaaatggctgaaggtgctcgagctaaaacagatagcgattatggaattgcacttaccggtgtagctggaccagattccttagaaggacacccagcaggtacggtatttattggtattgctgataggaatcaagtaaggtcaatcaaggttgttataggtggaagaagtcgttctgatgttagatatattagtaccctctatgcctttaacctagttcgccaagctttattacaagaagacataatttaagtttgtctttaacgatagaaagaagaggaaaataagtggctaagaaaacaaagaaaacagaagaaattacaaagaaatttggagatgagcgtcgtaaagcacttgacgatgctttgaagaatattgaaaaagattttggtaagggtgcggttatgcgtcttggtgagcgtgcagagcagaaagttcaagttatgagctcaggctcgctagctttggatattgctcttggtgcaggtggttatcctaaaggtcgtattatcgaaatttacggaccagaatcatcaggtaaaacaactgtagccctccatgctgttgctcagacacaaaaagaaggcggaattgctgcctttatcgatgcagagcatgcccttgaccctgcttatgcggcagccctaggtgttaatattgatgagcttcttttgtcacaacctgattcaggtgaacaaggtctcgaaattgctggtaagctgattgactctggtgcagttgatttggttgttgttgactcagttgcagccttggtacctcgagcagaaattgatggagatattggtgacagccatgtcggacttcaagcgcgtatgatgagtcaagccatgcgtaagctttctgcttctatcaataaaacaaaaacaattgctatcttcattaaccaattgcgtgaaaaagttggcattatgtttggtaatccagaaacaacccctggtggacgtgctctaaaattctatgcatcagtacgtcttgatgtacgtggaaatacgcaaatcaaagggactggtgataaaaaagaccaaaatgttggtaaggaaactaaaattaaggttgtcaaaaacaaggttgctccaccatttaaagaagcctttgttgaaattatgtatggtgaagggatttcccaaacaggtgagcttgtaaaaatcgctagtgacttaggcattattcaaaaagctggagcatggttctcatataatggtgagaagattggtcaagggtctgaaaatgctaaaaaatatttggcagatcatccagatatttttgaagaaattgatcataaagtacgtgtacactatggtttaattgaaccagatgaagaggatattgttgaagaagcacaagttgaagaaacatctgatgaacttgttttagacctcgattcaaccattgaaattgaggaataagtgtaaaagagccgacgagctcttttttctttgttttaattctaaataaaaaaggtctatgataattgaaaaagtcccaaagattcaaaataggtcgctagaccgatttcttaaatcaaggacagtgataagataatagtatcatgtgacagaaagagagaattaacatgattaagatttatacaatctcaagttgtacaagttgtaaaaaagcaaagacatggttgaacaaccatcaacttccttataaagaacaaaaccttggtaaagaaccacttacaaaagaagaaatcttaaacatcctatcaaaaacagagaatggtgttgaaagtattgtttcatcaaaaaatcgctatgctaaagctctaaattgtgatatcgacgagctcagtgtcagtgaggtgattgatttgattcaagaaaacccaagaatcttgaagagcccaatcttaattgatgataagagattgcaagtgggttataaagaagatgatatccgtgctttcttaccacgttcaatacgaaatgtcgaaaactcacaagcacgcatgcgcgcagctctataaaaagtaaaaaaggagattcttgcgatcttctttttacgtttactctggcatagaaaataagtattgacattagttcacaaacttgatagactaataaagtcttaaggaatttctccagtaacaaaaagtttgaaaaaaactttaaaaaagttattgacaagacaagtgagagatgatattataaataagctgtttcgcgagagatggccaacacgagaagtaaaaaaacttcaaaaaagtgttgacaagacattctagatttgctagaatatagaagttgtcttaagagagacaaagacctttgagaactgaataagaaaccaagtgcagggttatgatagaagaattataacctgtcaatttacaagaataaatcgtcagacgacggtaatgagttaacgctcgaacaattattaaagtttttaatgagagtttgatcctggctcaggacgaacgctggcggcgtgcctaatacatgcaagtagaacgctgaagagaggagcttgctcttcttggatgagttgcgaacgggtgagtaacgcgtaggtaacctgccttgtagcgggggataactattggaaacgatagctaataccgcataacaatggatgacacatgtcatttatttgaaaggggcaattgctccactacaagatggacctgcgttgtattagctagtaggtgaggtaacggctcacctaggcgacgatacatagccgacctgagagggtgatcggccacactgggactgagacacggcccagactcctacgggaggcagcagtagggaatcttcggcaatgggggcaaccctgaccgagcaacgccgcgtgagtgaagaaggttttcggatcgtaaagctctgttgtaagtcaagaacgagtgtgagagtggaaagttcacactgtgacggtagcttaccagaaagggacggctaactacgtgccagcagccgcggtaatacgtaggtcccgagcgttgtccggatttattgggcgtaaagcgagcgcaggcggtttgataagtctgaagttaaaggctgtggctcaaccatagttcgctttggaaactgtcaaacttgagtgcagaaggggagagtggaattccatgtgtagcggtgaaatgcgtagatatatggaggaacaccggtggcgaaagcggctctctggtctgtaactgacgctgaggctcgaaagcgtggggagcgaacaggattagataccctggtagtccacgccgtaaacgatgagtgctaggtgttggatcctttccgggattcagtgccgcagctaacgcattaagcactccgcctggggagtacgaccgcaaggttgaaactcaaaggaattgacgggggcccgcacaagcggtggagcatgtggtttaattcgaagcaacgcgaagaaccttaccaggtcttgacatcccgatgctatttctagagatagaaagttacttcggtacatcggtgacaggtggtgcatggttgtcgtcagctcgtgtcgtgagatgttgggttaagtcccgcaacgagcgcaacccctattgttagttgccatcattcagttgggcactctagcgagactgccggtaataaaccggaggaaggtggggatgacgtcaaatcatcatgccccttatgacctgggctacacacgtgctacaatggttggtacaacgagttgcgagtcggtgacggcaagctaatctcttaaagccaatctcagttcggattgtaggctgcaactcgcctacatgaagtcggaatcgctagtaatcgcggatcagcacgccgcggtgaatacgttcccgggccttgtacacaccgcccgtcacaccacgagagtttgtaacacccgaagtcggtgaggtaaccttttggagccagccgcctaaggtgggatagatgattggggtgaagtcgtaacaaggtagccgtatcggaaggtgcggctggatcacctcctttctaaggaaaaacggaatgtacttgagtttcttatttagttttgagaggtcttgtggggccttagctcagctgggagagcgcctgctttgcacgcaggaggtcagcggttcgatcccgctaggctccattgaatcgaaagattcaagtattgtccattgaaaattgaatatctatatcaaattccatatgtaattaaatacatatagatagtaacaagaaaataaaccgaaacgctgtgaatatttaatgagttaggtcgaaagaccaaaataaggttaagttaataagggcgcacggtggatgccttggcactagaagccgatgaaggacgtgactaacgacgaaatgctttggggagctgtaagtgagcaatgatccagagatgtccgaatgggggaacccggcaggtaatgcctgtcactcattactgttaaggtaatgtagaggaagacgcagtgaactgaaacatctaagtagctgcaggaagagaaagcaaaagcgattgccttagtagcggcgagcgaaacggcaagagggcaaaccgaagagtttactcttcggggttgtaggactgcaacgtggacttaaagattatagaagaactacctgggaaggtaggccaaagagagtaatagcctcgtattcgaaatagtctttatacctagcagtatcctgagtacggcgagacacgagaaatctcgtcggaatctgggaggaccatctcccaaccctaaatactctctagtgaccgatagtgaaccagtaccgtgagggaaaggtgaaaagcaccccgggaggggagtgaaatagaacctgaaaccgtgtgcctacaacaagttcgagcccgttaatgggtgagagcgtgccttttgtagaatgaaccggcgagttacgatatgatgcgaggttaagttgaagagacggagccgtagggaaaccgagtcttaatagggcgcattagtatcatgtcgtagacccgaaaccatgtgacctacccatgagcaggttgaaggtgaggtaaaactcactggaggaccgaaccagggcacgttgaaaagtgcttggatgacttgtgggtagcggagaaattccaaacgaacttggagatagctggttctctccgaaatagctttagggctagcgtcgatgttaagtctcttggaggtagagcactgtttgggtgaggggtccatcccggattaccaatctcagataaactccgaatgccaacgagatataatcggcagtcagactgcgagtgctaagatccgtagtcgaaagggaaacagcccagaccaccagctaaggtcccaaaatatatgttaagtggaaaaggatgtggggttgcacagacaactaggatgttagcttagaagcagctattcattcaaagagtgcgtaatagctcactagtcgagtgaccctgcgccgaaaatgtaccggggctaaaacatattaccgaagctgtggatacctttataggtatggtaggagagcgttctatgtgcgaagaaggtgtaccgtgaggagtgctggagcgcatagaagtgagaatgccggtatgagtagcgaaagacaggtgagaatcctgtccaccgtaagactaaggtttccaggggaaggctcgtccgccctgggttagtcgggacctaaggagagaccgaaaggtgtatccgatggacaacaggttgatattcctgtactagagtatatagtgatggagggacgcagtaggctaactaaaccagacgattggaagtgtctggccaagcagtgaggtgtgatatgagtcaaatgcttatatctataacattgagctgtgatggggagcgaagtttagtagcgaagttagtgatgtcacactgccgagaaaagcttctagcgttaattatactctacccgtaccgcaaaccgacacaggtagtcgaggcgagtagcctcaggtgagcgagagaactctcgttaaggaactcggcaaaatggccccgtaacttcgggagaaggggcgctgacttatggtcagccgcagtgaataggcccaagcaactgtttatcaaaaacacagctctctgctaaatcgtaagatgatgtatagggggtgacgcctgcccggtgctggaaggttaagaggagtgcttagcaatagcgaaggtatgaattgaagccccagtaaacggcggccgtaactataacggtcctaaggtagcgaaattccttgtcgggtaagttccgacccgcacgaaaggcgtaatgatttgggcactgtctcaacgagagactcggtgaaattttagtacctgtgaagatgcaggttacccgcgacaggacggaaagaccccatggagctttactgcagtttgatattgagtatctgtaccacatgtacaggataggtaggagcctatgacctcgggacgccagtttcgagtgaggcgttgttgggatactacccttgtgttatggctactctaacccagataggttatccctatcggagacagtgtctgacgggcagtttgactggggcggtcgcctcctaaaaggtaacggaggcgcccaaaggttccctcagaatggttggaaatcattcgcagagtgtaaaggtataagggagcttgactgcgagagctacaactcgagcagggacgaaagtcgggcttagtgatccggtggttccgcatggaagggccatcgctcaacggataaaagctaccctggggataacaggcttatctcccccaagagttcacatcgacggggaggtttggcacctcgatgtcggctcgtcgcatcctggggctgtagtcggtcccaagggttgggctgttcgcccattaaagcggcacgcgagctgggttcagaacgtcgtgagacagttcggtccctatccgtcgcgggcgtaggaaatttgagaggatctgctcctagtacgagaggaccagagtggacttaccgctggtgtaccagttgttctgccaagagcatcgctgggtagctatgtagggaagggataaacgctgaaagcatctaagtgtgaagcccacctcaagatgagatttcccatgattttatatcagtaagagccctgagagatgatcaggttgataggttagaagtggaagtgtggtgacacatgtagcggactaatactaatagctcgaggacttatccaaagaaagtaactgagacatattgacaacgatttggtttcttgatacagtatagatattcaattttgagttgagaatactcagagttaagtgacgatagcctaggagatacacctgttcccatgccgaacacagaagttaagccctagtacgcctgatgtagttgggggttgccccctgttagatacggtagtcgcttagcgcatagggagtttagctcagctgggagagcatctgccttacaagcagagggtcagcggttcgatcccgttaactcccattaagcgggtgtagtttagtggtaaaactacagccttccaagctgttgtcgcgagttcgattctcgtcacccgctttatttggaaacaaataaccaagcatttagcttgggcgcgtagctcagatggttagagcgcacgcctgataagcgtgaggtcggtggttcgattccactcgtgcccattatatggtccgttggtcaaggggttaagacaccgccttttcacggcggtaacacgggttcgaatcccgtacggactatgtttttatggaggattacccaagtccggctgaagggaacggtcttgaaaaccgtcaggcgtgtaaaagcgtgcgtgggttcgaatcccacatcctccttataattaacgcgggatggagcagctaggtagctcgtcgggctcataacccgaaggtcgtaggttcaaatcctgctcccgcaatatggctcggtagctcagttggtagagcaatggattgaagctccatgtgtcggcggttcgattccgtctcgcgccatttgtttatattttggaagggtagcgaagaggctaaacgcggcggactgtaaatccgctccttcgggttcgggggttcgaatccctccccttccatagttacgggcatagtttaaaggtagaactaaggtctccaaaaccttcagtgtgggttcaattcctactgcccgtgttagtaaagtggcgaatgtggtgaagtggttaacacatcagattgtggctctgacattcgggggttcgattcccctcattcgcctatatttttggggtatagccaagcggtaaggcaagggactttgactccctcatgcgttggttcgaatccagctaccccagttatactttgccggcgtggcggaattggcagacgcgctggactcaaaatccagtgtccgcaaggacgtgccggttcgaccccggccgccggtataagttacactccttaaggagtgtttttttgtctataggagtttattttttatgtctgataaatttcagcttctcttaaaacaaattcgttttcctgaggatcacgatgcttttaaagaaattaaagatggttctatcgaaacagtaaagctatttaaatcaaaacgccaatggttctttgttttttcttttcctagtgttctgtcttatgagtcttttgctctttttgatagtttacttcactcttcttttaattctttaggtgctaaagcttcttttgagattcgtttagtttctactgcttgcgatgattctttacttggagattatttttcatatgctttagatagtttaaaagtgtcacacttttctacttattctttattctcaaatctaaaggttgagatttcgaataatagtatttttgttaaagctccagagcatattataaaggaaaatgtacaggatagatttatttctttgatatctaaatctctttctcaagttggtttatctgatgtatccatttctgttgtcgaagataaggaagcttcatcttctttagaagaggcttaccaaacaaataaggtttctttacaagaacaagccgagtctcaagcaagacaagcgcttcaatctattcttgaaagtgccccagcaccgaaacctgtgaccgaaccatcacaaaattttgctgagaaacaaagtcaacgtcaagctagttttgataaggctgaaataacgccaatggttgatattaattctgaagaaaatcgtgttgtttttgaaggatatatttttgatgtagagcaacgtgaaacaaagacgggtagaattattattaattttaaggtaactgattatacctctagttttgctatgcaacgatgggtcaaagatagtgatgagctcgctaagttcgatatgataaaaaaggggaactgggttagggttcgtggccgtatcgagaataatcctttcactcatagtctgactatgaatgtgcaagatattaaagagatttctcatactcctcgtaaggatttgatgcctgagggacaaaagcgtgtggaatttcatgcgcataccaacatgtcgactatggatgcaatgccaactgttgaaaatcttattgatacagcggcttcttggggacatccagcagttgccattactgaccatgctaatgttcagagttttcctcatggctaccatagggctaagaaagctgggattaaggctatttttggtcttgaagccaatcttgttgaggataaagttcctattgtttataattcccagaatttggaattaaaagaagcaacttatgttgtatttgacgttgagacaacgggcttgtctgctgttcataatgatttgattcagattgcggcatcaaaaatgcataaaggtaatattattgagcaatttgatgaattcatagatccaggacatcctctttctgcatttactactgagttgaccggtattactgataatcatgttaaaggtgctaaacctttagtgcaagttttacaggaatttcaagaattctgtcaaggaactgtgctagtggcccataatgcgacctttgacgttggttttatgaatgccaattacgaaagacatcagttaccaacaatttcacaaccggttattgatactttagaatttgcacgaaatctttatcctgagtataagcgtcatggtttggggcctttgacgaagcggtttggtgtggctttggatcatcaccatatggccaattatgatgcggaagctactggtcgtttgttgtttatcttcataaaagatgtgtttgataagcacggtttgactaatctggaacagttgaatacggatttggtttccgaagattcgtataaaaagtctcgtgtcaaacatgcgacgctgtatgttcagaatcaaactggcttgaagaatatctttaagttggtaagtttatcaaatgtctcatactttgagggagtagcacgtattcctcgtacggtcttagatgagtatcgtgagggaatcattgtaggttctgcttgtgcagatggtgaggtttttgatacgcttctgtctcatggtattgacaaggcagttgaagttgctaaatattatgactttattgaagttatgccaccagcgatttatgcaccattgattgcgaaggacttaattaaggatgaggtggctatagaacagctgattcgagatttgattgaagttgctaatcgtctggacaagcctgtgcttgctacaggaaatgtacactatatcaaccctgaggatgccatttaccgtgaaatcattgttcgtgctttgggacaaggagccatgattaataggccaattggtaagggagaaaatgcgaaacctgctcctttacctgaagctcattttaggacaactaacgagatgctagatgactttgcctttttgggaaaagacttagcctatgaaattgttgtaactaatacgcaggctatggcagatcaaattgaagaggttgaggttgtcaaaaaagacttgtacacacctttcattgatcgtgcggaagaacaggttgcggagatgacatatgctagagcgtttgagctttatggaaatcctttgcctgatattattgacctgcgaattgagaaagagttgtcttcaattcttggtaatggttttgccgtaatctacctggcttcgcagatgctagttaaccgttcaaatgaacgtggctacctagttggttcgcgtggatctgtcggatctagttttgttgcgacgatgattggaattactgaggtcaatccgatgccacctcattatctatgtcctaattgtcaacactcagagtttattacagatggttcctatggatctggcttcgatttgcctgataaggagtgttcggaatgtggaacggagtataaaaaagatggtcaggatattcctttcgagaccttcctaggttttgatggggataaggttcctgatatcgatttgaacttctccggtgatgatcaaccatcagcccacttggacgttcgtgatatttttggagagcaatatgcttttcgtgccggaacagtaggaactgttgcagatcggacggcttatggttttgttaaaggttacgaacgtgattacaataagttttaccgtgatgccgaggtcgatcgtttagccatgggggctgcgggtgttaagcgaaacacaggtcagcacccgggtggtattgttgttattccaaattatatggatgtctatgatttcacacctgttcaatatccggcagatgatgtaacggctgcctggcagacgactcactttaacttccacgatattgatgagaacgtgttgaagcttgatattctgggacatgatgatccgactatgattcgtaagttgcaggatttatcaggaatcgatccaaaagatattcgagcagatgatccagatgtaatgaaacttttttcagggactgatattttaggggtaacacctgaacagattgggacaccaacgggaatgttgggaatccctgagtttgggactaactttgttcgtggtatggtcgacgagacgcatccgacgacctttgcggaactcttacagttatcaggtttgtcccatggtacagacgtttggttgggtaatgcacaagatctgattaaggaaggtatcgccaccctgaaaacagttatcggttgtcgtgatgatatcatggtatacctaatgcatgcgggattagatcctaagatggccttcacgatcatggaacgtgtgcgtaaggggatgtggttgaagatttccgaagaagagcgtaatggctatattcaagccatgcgtgaaaataatgttccagactggtacattgaatcttgtggtaaaatcaagtacatgttccctaaagcccatgcggcagcctacgttatgatggccctacgtgtagcttatttcaaagtgcaccatcctatttattactattgtgcctatttctcaattcgagctaaagcatttgagcttaagacgatgtctgcaggtcttgatgctgttaaagctcgaatggaagatattaaggagaagcgccaacgaaatgaagcgactaatgttgaaaatgacttatttacgacgcttgaaattgtcaatgaaatgttagaacgtggctttacctttggtcagttggatctttataagagtcaggcaactgaatttttgattgaaggagataccttgattccaccgtttattgcacttgaaggtttgggtgagaatgttgctaagcaagtggttgctgcgcgtgaagaaggggagttcctttccaagacagaattgcgtaaacgaggaggcctatcatcaaccttggttgaaaaattggatgaaatgggaatcctaggaaatatgccagaagataatcaattaagtctttttgatgatttcttttaatggctgaagagaattgtcatcaactttgagagaatggagtcagtctccgttctctttttgtttagggggctgcatgtgatgctaaaaagccaaagctgagaggaaacctttttcttcgtcttatggtatactgatagaaaattatagtttcaaggagttaatcatggttttaccaaattttaaagaaaatcttgagaaatatgctaaattactggttgctaatgggattaatgtgcaacctggtcacacagtggctttgagcattgatgtagaacaagcagagctagcacacctcttagttaaagaagcctatgctctaggagcagctgaggtaatcgttcaatggtcagatgatattattaatcgcgagcgcttcttgcatgctgatatggaccgcatcgaagaggttcctgcctataaaaaagctgagatggaatatttgttggccaagaaggcaagtcgcttaggtgttcgttcatcagatccaggtgcccttaatggtgtagctcctgaacgtttatctgctcatgctaaagctactggagtggcttttaaacctatgcaggtggcaactcagtctaataaggttagttggactgtagctgctgcagctggtaaggaatgggctaagaaggtctttcccgatgctgcgagtgatgaggaagctgtagatttactttgggaccaaattttcaagacttgtcgtgtctatgaagaggaccctgtacgtgcttggaaggaacatgctgatcgcttggatgctaaagcacgcctactcaatgaagcacaattctcagccttacactaccaagcacctggaacagatttgactctaggattgcctaaaaaccatgtttgggagtctgcaggtgccattaatgcgcaaggtgaaggtttccttcctaatatgccaacagaagaggtctttacggcaccagattttcgtcgtgcagatggttatgtctcaagcacaaagcctctaagctacaatggtaatattattgagggaatcaaggtaaccttcaaagatggtgaaattgtagatatcacagcggaccaaggtgatgaagtgatgaagaatctcgtcttcaacaataatggggcgcgtgctctaggtgaatgtgctttggtaccagatccaagtcctatttcacagtcaggcatcactttctttaacactctttttgatgagaatgcatccaaccacctagctattggagcagcctatgctaccagtgttgagggaggggcagacatgacagaagaggagcttaaggaagctggtcttaatcgttctgatgtacacgtagactttatgattggttcaaatcaaatggatattgatggtatccgccaagatggtagtcgtgtaccgatcttccgaaatggggattgggtaatctaagtatgagggagaatttatcatgattggaagtatgatagttggttttctaattggccttattgcctctgctatatcaaataggggtgaacatatgggctgtattggtaagacctttgttggatggctaggtgcttttgttggtcagcttctttttggaaattggggaccgatgctagcagatactgctatcgttccttcagtactaggtgctgttatcttattagcccttttttggaatcgtaatagttagaaatgaaagagttctgaggtattggttagatatctaaggactcttttttcttattttttcattttcatataccacttttagaaaaactgtggtagagtaataaaaacagcatctatttggaaaggactagaaatgagtgacttagataaaaacatggctgtaaaaagtatggtagttatgcgtaaggcttttcgtaccatcgatgccaaggtttctgagacctttaaagaatttaatttgacaccaactcaatttggagtcatggacgtgcttaatgctaaaggacgtatgaaaattggcgaattaattgactgcatgcttgccacctccgggaatatgactgtcgtcattaaaaatatggagaaaaaaggttggttgacgcgagaagcctgccaaacagataagcgtgctttcgaggttgatttgacggatgagggccgtcgtattattcaagcagcaatcccgccacatcaacgagctattgaggagactttttccgttctgacacctgaagagcaggcacagttggtagagctcctgaaaaaatttaagaatgtctgagcatatttctttatatttctaatggaattatatatattactatgtagtagtaaaaattaattattagaaatacaaaggaaacgtatcatgaaaaacattttatttatcgttggatctcttcgcaagggatcatttaaccaccaattagcagaagaagctgagaaaatgttagctggtaaagctaatgtttcttatcttgactatagtcaagtacctgtttttaatcaggatttagaaagtccagttcttccagttttggcagaagttcgagaacaggtcttggcagcagacgcaatttggattttctcaccggtttataatttctcaattcctgggccagtgaaaaatttgcttgactggttgagccgtgcccttgacctatcagatccttcagggccatcagctcttcaagataagattgtaaccgtgtcatcagttgctaatggtggtcacaatcaactttttgatgcctacaaagacttgttaccatttatccgtacccaagtggttggtgattttacagcgacacgtgtaaatgatacagcctgggcagatgggaaattcctagcaactgaagaagttcttgaaagccttcagaatcaagcggaagctttgattgaagcgattaaataagaataatgaatacccgaggtttctagcttcgggtatttttatatgcaataatgaaaaaaagacaccctaaggtgtcttcgtattatgaaggcggtagacggatttgaaccgacgatcaagcttttgcagagccgtgccttaccacttggctataccgccataacagataccattctatcgaaaaaaaaaagattcgtcaagtctctttcatcaaattgactggttgattattcaaactgcctatttacaagaaacataaagaggttgaaagacattcaacctcttcatattaattataactgttgaagatagattactaacacgcaagtgttgattattgtctaatcaagtaatcaaatgctccgatagcagctgtagcaccagaccccatggagataatgatttgcttgtaggcactatctgtacagtcacctgcagcaaaaataccagggatatttgttgaaccaaatttatcaacgataatttcttggcgctcattgagttcaataccactatctttgagccaagcagtacttggtacaagaccaatttgaacaaagacaccttcaagatcaagatgtttttcttcgtttgtatcacgctcaacgtaattcaaaccagttacatgatcttgaccaacaatttctttggttgcaacgttcttaagaatggttagattatcagttttagcagctcgttcttgtaagacttgatctgcctttaattcaggtaagaactctaagaccgtaacatgtttagtaatgccagctaaatctaaagccgcttccaaacctgagttaccaccaccgataactgcaacattcttcccttcaaatagtggaccatcacagtgtgggcagtaagtaacacctttattgcggaattcttcctcgccaggaacgttgatattacgccatttggctccgagagccaggatggcagttttggattttaaaacggcaccgttagccagtgtcacttcaataagttctttcttttcgatgccagtagctaattgacttttgatgatatcaacatcataagatttcgtatgctcttcaacttgggccattaacttaggaccttctgtatatagcgtaccaatcatgttctcaatgccgactgtctcgataacttgtccaccaaaggtttctgctaaaagaccagtttttaaacctttacgggcagcatagatggccgcactgtttccagcagggccaccaccaataaccaaaacatcatagacacctttatcagcgaaagcatcagcatcaagtggtccgtccaatttttctacaagctgttcaatggttgcacgaccagatgtaaattcttcttggtctttgtaaaccgtaggaacagacatgatacctttagctttgacctcatcctgatacatcccaccttcaatcatggtgtgagtgatatttgggttcaaaacagccattatattaaaggcttgaacaacgtctggacaattgtgacatgttaatgaaacataagtctctaaatcgatggttttatcaatcttcttgatacgttcgatagtgtccttatcaactttaggtggacgaccagaaacttgcaagagagctaaaatgaaagatgtgaattcgtggcccattggtaagcctgagaaaataacacgacttttttgccctttttgtgtaataccaaaactaggttgacgttttaaatgtgttgattcaagactaatacggtcagacatagcggcaatctcgtctagaaattcttttacttttcgagaattatcgtcatcccctaaatccgtttgtaatacaatatcagattctagtaaatttaaatattgtgctaattgcgtcttgatttctttatctaagaccatggataccccctggttgttaaattttacctacaagatctaagctaggagtaagtgtttcagctccttctttccatttggctggacaaacttcacctggatgttggcgaatatattgagcagcacggactttatcaataagagtgcttgcatcccgtccgataccgtcagcgttaatttccatcatttggataacgccatctggatcaatgatgaatgtaccacgttgtgcgagaccatcttgcccaagaacatcaaagccttgtgagatgtggtgtgaaggatctccaatcataggataagtaatagttccaacaacatctgagtcatcatgccaagctttgtgaacaaagtgagtgtcagtagagacagagtaaacctctacaccaagagatttaagagcttcatattgttcttgaaggtcaccgagttcagttgggcagacaaatgaaaaatctgcagggtagaagcagaaaacagcccattttcccttaatatcttcatctgtaacagtaatgaattccccgttgtggtaagcttgtgctgaaaattcaataatttcttttccgactaatgacaaaataatgtcctcctctatttttgatagcctaattataaacaaaatacttatcaacctcaaagaaaacgattgcaattttaatacgggtgaattttttctaatggtcagactgattttagagcttgtcaaatgtcactttttttgataaactactatagttgcgtaaagtgacaaatactcattctaagccgattgtggtcttgttgccgcagggtgggactgcaagtctaaagcttagaagaggaaaaaacaatttttaaggagaaatactcatggcagtaatttcaatgaaacaacttcttgaggctggtgttcacttcggtcaccaaactcgtcgctggaatcctaagatggctaagtacatcttcacagaacgtaacggaatccacgttatcgacttgcaacaaactgtaaaaatggctgatacagcttacgaattcgttcgtgaagcagcagctaacgatgcagtaatcttgttcgttggtactaaaaaacaagcagctgaagcagtagctgaagaagcaactcgtgctggtcaatactacatcaaccaccgttggttgggtggtactcttacaaactgggatactatccaaaaacgtatcgctcgtttgaaagaaatcaaacaaatggaagctgatggaactttcgaagttcttcctaagaaagaagttgcacttcttaacaaacaacgtgcacgtcttgaaaaattcttgggtggtatcgaagatatgcctcgcattccagatgtaatctacatcgttgacccacacaaagaacaaatcgctgttaaagaagctaaaaaacttggtatcccagttgtagcgatggttgatacaaacgctgatccagatgagattgatgtaatcatcccagctaacgatgacgctatccgtgccgttaaattgatcacttcaaaaatggctgatgctatcatcgaaggtaaccaaggtgaagatgcttctgcagatttccaagaagcagctgcagctgattcaatcgaagaaatcgttgaagttgtcgaaggtgacaacaactaatctttaagattggtttgggctcaatgcccactaaagatacgacaaacacctaaggggcggggctcagccctgccccttagtttgataaaataaatttggagaaaaacaaaatggcagaaattacagctaaacttgttaaagaattgcgtgaaaaatctggtgctggtgtcatggacgctaaaaaagcattggttgaagttgaaggtgatatcgaaaaagcaattgaattgcttcgcgaaaaaggtatggctaaagcagctaagaaagctgaccgtgttgcagctgaaggtttgactggtgtttacgttaacggtaacgttgcagcagttgttgaagttaacgctgaaactgacttcgttgcgaagaacgctcaattcgttgagttggtaaacgaaacagctaaagtaattgctgaaggtaaaccagctaacaacgaagaagcacttgcattgactatgccttcaggtgaaactcttgaagctgcatacgtaactgctacagctactatcggtgaaaagatttcattccgtcgttttgcagttgttgagaaaactgatgcacaacacttcggagcttaccaacacaacggtggacgtatcggtgttgtttcagttatcgaaggtggagatgatgctcttgcaaaacaaatctcaatgcacatcgcagcgatgaaaccaactgttctttcatacactgaattggacgaacaatttgttaaagatgaattggcacaacttaaccacgctatcgatcaagataacgaaagccgtgctatggttaacaaaccagctcttccacaccttaaatatggttctaaagctcaattgactgatgctgttcttgctcaagctgaagaagatatcaaagctgagttggctgctgaaggtaaaccagaaaaaatctgggataaaatcatcccaggtaaaatggaccgcttcttgcttgacaacactaaagttgaccaagcatacacacttcttgctcaagtttacatcatggacgacagcaaaacagttgaagcttaccttgaatcagtaaacgcttcagtagtagaattcgttcgctttgaagttggtgaaggtatcgaaaaagcatctaacgactttgaatcagaagttgcagctacaatggcagcagctcttaacaactaattctagttgctagataaaaagaaaagaagttacgtgaatgaatcgtaacttcttttttgttgctattaaaaaaacgtctgagcatgccccagacgttgaaaaaagtaattaatgagcgaaggtatttacaccaagtagaagagagagtgttcccatgatgatacctgcaaggataaccccaagcataacagcaataacactacgtttaaagtcccaatctaggatagatgctgctagggtaccagtccaagctcctgttcctggaagcggaattcccacaaaaagtagaagggcccagaagacacccttatctccagcagctttttcaagtttttggccaccactgtgaccttttttaagacaccaggtaaagaagccaccaattagaggtttatctgccccccattcgaggacacggcgggcgaagaagaagataattggaactggaatcatgttcccaatgacacaaagaattagggcttgccaccaagggatacctgaggcgatagcaacaggaacggctccacggagctcaaccaaaggaatcatagagattaagagtgcaatgatgtatttcatgagtaacctttcataggggaataaaataagagataagactcaaaatgacatgagctttatcgagagtgataagactaatactactgcgaaagtgctaaaaagtacttgttggattaggtgggtctcagcctatcaaagtagatagaaaatttgaatcaaacaccttaagttacctaatatttcagtcttatttattgtatcttatatggtctctaatgacaactttaaaaagctttttgagggtatagtttcccatgagctgacatttttggtataataatagtcagttatagtcaaattagactggaggaattaagatggcaagaaatacatcagatagtatagaagaatatattaaagaattgctgggccagtctggaattgctgagattcaacgctcgaacttagcagatacttttcaagttgtaccgagtcagattaactatgttattaagactcgttttacagaaagtcgtggttatattgttgagagtaaacgtggaggtggcggttatattcgtatcgtcaaggtcagattctccgacaagcaccacatgattaatgatttgcttcagaacttggcggatcagctcagcgagcaggtatttacagacttgattcagttgctttttgatgaaaaaatcatcactgaacgtgagggaaatttgattttagcaactgctagtgatgatgttttaggcgaagatgcggctgctattcgttcgcgtattctacgctcgctattacttagattggatagaaaaggaaattagatgacgacatattcaagaaaaatgcaggccattttccatcgtgctcagcttgaggcagagcgttttggaagtcctttcttggagacttggcatgtgcttctggctatggttgaggttccaggatctgtagcctacctaacatttactgattttgaggaccgtattcgtgcggaagagattgagaccgctgctgtactagcgatggagaaaagtccaaaagacttgtctgaatcagatattatcgatttacgtgcacagtcacatgctttaggggctatgttgcaagaggcagagggaattgctagtgtaactggtgctgtagaggtagggtctgaacatgtattgatggcctttctccttcataaggatttgatggtttgtcgtctccttgaagttgctggttttcaatataaggatgacagcgataagcctcgcattatcgatttacgacgttctttggagcgttacgcaggtcttagtaagcaagatttgaaggccattcacgaccttcgtaagcctaaaaagtcaaaggcatcaggtaattttgctaatatgatgcagcctcctcaatcttctactggggaactgtcagattacacaaaagacttaacggcagtagccgagtcaggtgctcttgatcctgttattggacgtgagaaagaaatttcacgcatgattcaggttttgagtcgtaaaacgaagaataacccagttcttgtgggtgaagcaggtgttggtaagacggcacttgcgcttggcttagcacagcgtattgcttcaggcgaagtaccttttgagttggctgatatgcgtatcttagagcttgatatgatgagtgtggttgcaggaacacgtttccgtggcgatttcgaagaacgtatgaatcagatcattgatgagattgaagctgatggaaaaatcattctctttattgacgaattgcatacgattatcggttctggttcaggtattgatagtaccttagatgcggcgaatattttgaaacccgctctagcacgtggaacccttcatatggttggagcaactactcaagctgagtaccagaagcatattgagaaagatgcagctctttctcgccgttttgctaagattacaatcgaggagccaagtgtagctgaggcgattgatattctaaaaggcctacggtcgtcttatgaagactatcatcgtgtaacgattactgatgaggcggttgagacagcagtcaaggcagcccaccgttatttgacgagtaaaaacttacctgactctgccattgaccttttagatgaagcgagtgcaactgttcaaggtcgtatcaaaaaagaagccaaacttgaaataacgcctttggacgaagcgcttctatctggtgatatgaaggctgctgttaaacaatataaggctagccaaaaagcaaaattaccaaaacctgccttggtagatgcagatcagattatgcaaacccttagtcgtctatcaggtattcctgttgagaagatgactcaggcagatagcaagcgttacttgaatctggaagcagagcttcacaaacgtgttattggtcaagacgaagcagtttcagcgattagtcgtgctattcgtcgtaaccagtcaggtattcgtactggcaaacgtccgattggttccttcatgttccttggacctactggtgttggtaagacagaattggccaaggctttggcggaggttctctttgatgatgagtcagctttgcttcgctttgacatgtcagaatacatggaaaaatttgcggctagccgccttaacggtgctcctccaggttatgttggatatgatgagggtggtgagttaacagaaaaagttcgtaacaagccttactcagttcttctttttgacgaggtagaaaaggctcacccagacattttcaacattctcttacaggttttggatgatggtgtcttgacggatagtcgaggtcgtaaagtcgacttctcaaataccattatcataatgacttcgaacttgggggcgactgctcttcgcgatgataagactgttggttttggtgctcgagacatttctcataatcatcaagctatgcagtcacgtatcatggaagagcttaagaaggcctaccgtccagagtttatcaaccgtattgatgagaaggttgtcttccatagcttagaggaagaacagcttcgtgagattgtcaaaattatggtaaaaccgttggtttcagctttggctgaaaaagggattgacttgaaattccaaccagctgtcctcaagcatttggctaaagatggctatgatgttgagatgggtgctcgtccattacgtcgcacgattcaaactcaggttgaggataagttatctgagctcttactaggcggccaagtagtgagtggacaaacccttaagattggttgttcgaaagataaattaacctttacagtagtgtaaagattaaacaaaaagacagattacaggtgtattttgtctttttgtttgtgtcaacaggagtcaaggtagagtcaatctttctgtaaagttgggtaaaagaaaaagccgagcaaggctcgactataaggtttagagtttttcgttgacaaaggtgacaaagtgattccaccagaccttgaggaagaagcttttcttaacttctttaccagcaaccagttccatgctaggcataccttggttaggtaggtaaccttctccgacaagtgacttatcttcaaaggtagcagttccaaccttgtctcctggtttgacaggagcttggacttgatttgtagtaactttaatatgtttactattgttagcatctattttttggatgatattaaagtcagacttagcgacggcagtgacttgcttagatttaccatcaataacatgggcttgacttttaccgatagcttgtccttttttggcaatggtcttgctttcccaatgatagactacgtagttaagtaggtcattggttgcagtgaaacgggcgtagtcatcagtatcggtattatcagcattcataatgactgtgataatgctcatgccactttcatttgagtgggccacgaaggaagcaccggccaaatcggtggtacctgtttttagaccatcaactcccttgcggtaactaggttgtcccttaagcatgtagttgaaggttttaagtttgttgacaccatcaaaatcagcctcggtttttttagtgatatcgagaatttcaggatattctttcaccacgtgttgcgcaatgatagcaacgtccttagcactcatggtgttttcttcgtcagatttagagcctggatagatattgtcacctaagtaggaattattaagaccagaggcattgacaatcttggcatcagtgataccccaatctttaagttgggctttcatcatatcgacaaacttgctttcggttccaccgatttcctcagctagagcaatggatgcactattggcactggaaataagggttgcgtcaaggagctgtttaacagtgtacttacgggcatctagtggaatattggatactccggcactgacagttagttcaaagggatagtcagaaatctcaactttgctattccatttgaggtctccctgatctaccgctttatacaccatgtaggccgttaggagcttggtaatagagccaatccctgtagaggtagtggcatctttttcgtataaaattttgccagtagtcgcttcgacagcgatggcatgtttggctgcggcatcatatccttttttcttatctgctgcaaaagcaggggctacgcttcccagacagagtaagaaggtcatcataagcgtaatcagttttttcatggtttgttccttcatgtgttttggatatttattataccacattttgagaggaacttaaggtgttgagaaggggcttttacttacaagaccaattttgaaggcaagataaaactaccttttgatagctaaaaggtagttttgtgtttacttgtttcctgtaaagaaattaacgatatgattccaccaaacttttaagaagaaacttttcttgatagattggttggctgttacagaaacttgaggtggctcagagatgtaacctgtccctacgagatccttatcatcaaaagttgcagttccgatagtatccccttttttgataggtgccgttatggtttttgctttgattttaacagcatcatttttactatttattttttgaacgaccgtaaggtctgactcgagtttagcagagatggtttggctatctccgtcagccaccttgatatcatttttcttgacgatttgtcctttggtgttgagggttttgatttcccagttttgtgtcacataatctagcaactcatttgtggctgtgaatctggcagcttcatcttctccgccattatccgcattcataacaacggtaatcaagctcatgccattttcattggagtgggctacgaaggaagcccctgcaagttcagttgttccagtcttgagtccatcaacgccttcacggtagttgtcttgaccttctaacatgtagttgtgcgtcgttaatttgttgtcaccttcgaaatcagtttcggtttgcttggtgatttcaagtacctgaggatagtctttgatgaggtggtctgcaataatggcaacatctagagcactcatagtattttcgtcatctgctttagagccaggatagcggttatcgcctaggtatttattatttagtcctgaagcgttgtataatttagcatctgtaatgccccactctttaagttgggctgtcatagtgtcaacaaatgcactctctgatcctgagattttttcagctagagcaatagcagtactgttagcgctggaaatgagggtggcatctaggagctgtttaacagtgtattttcgggaatctagtgggacatttgaaacttctgaatcaacggttaagttgaaaggatagtctgagatatcgacgtcagtgtcccaggtaatttttccttggtcaactgctttatagaccatgtaggctgttaggattttagtcattgaagccacaccgtcaggagtagtggcgtccttttcatagaggactttccctgtagttgcttcgacagcaatcgcatgtttagcggaaacattgaagtcatctgtctgttcttgtgctagagcaggtgttactaggcctagtaagattaaggcaatcataatgatgtgttgtaattttttcatagtcattcctttgtctctcataagtgtttattatatcacaaaacgacttaaatatctgagagaaagggagacttgggtgctaacttatgccggagctctgccatttttgactatattatggtaaaatgaaagttatatcaaatgaatgacataaagttgaccggttcgtttttgtaagggctggtcatggataaaaagagggatcaaacatggctaaacaaacttttgagatgacctttgcaggacgcccgcttgtcgttgaagttgggcaggtagccaagcaggctaatggtgctgtcgtcgtgcgttatggagatacaacggtattatcaacagctgttatgtctaaaaagatggcaacggtagatttctttcctttacaggttaattatgaggaaaaaatgtatgcagctggcaagttcccggggggctttaacaagcgtgagggtcgcccttcaacagatgccacgttgactgctcgcctcattgatcgtcctattcgtcctatgtttgcggagggctttcgtaacgaagttcaggtcattaacacggttctctcttatgatgagaatgctagtgctccgatggcggctatgtttgggagttctttagctctttctatctctgatattcctttcaatggtccaattgctggggttcaagtagcctatgctgcagaagatttcatcatcaatccaagtgcagcggataaggaagtttcacttttagatttgacagtggcaggtaccaaggaagctatcaatatggtagagtcaggtgcccaggaattgtctgaggatattatgttgcaagcactcttgaaggggcatgaggccattcaagagttggttgatttccaaaattatatcgttgcagctgttggtaaggaaaaggctgaggttgaacttctacaagttgatgctgatttgaaagtcgaaatcgaaacagcttattatgatcagttagcgaaggctgttcaggtggaagaaaaactggcgcgtgaagcagcaactcaggctgtaaaagaagaagtcctcgcttcttatcaagaacgctttgcagaagatgaagataaggaaaccattctgcgtgatgtggcagaaattcttgagcagatggaacatgctgaggtgcgccgtctcattaccgaggataaggttcgtccagatggccgtcgtgtggatgaaatccgtcctttggacgcagagattgactttcttcctaaggttcatggttcaggtctctttacacgtggtcaaactcaagccttgtcagttttgactttggcacctatgagtgatacacagcttgttgatggtttggatccagagtataagaaacgtttccttcaccactataatttccctcagtattcagtgggtgagacagggcgttacggtgcaccaggtcgacgtgagattggtcacggagccttgggtgaacgtgcccttgctcaggttctcccaagtgttgaagagttcccttatgctatccgtttggtagcagaagtcttggagtcaaatggttcttcctcacaagcttctatttgtgcaggaaccttggctcttatggctggtggtgtaccgattaaggcacctgttgcaggtattgccatgggacttatctcagatggtactaactacactgtcctaactgatattcaaggtttggaagatcattttggagatatggactttaaggtggctgggacacgtcaaggaattacagctcttcagatggatattaagatttcgggtattacaccggccattctcgaagaggctttggctcaggcaaaggtagctcgttttgaaattcttgatgttattgagtcagcaatcgctgagccacgtccagaattggcaccaacagcacctaagattgatagcattcagattcctgttgacaagatcaaggttgtcatcggtaaaggtggcgaaactattgataagattatcgctgaaactggtgtcactattgatatcgatgaagaaggtcttgttcagattttctctagcgatcaggatgctattaaccgtgctaaaactatcatctccgatcttgtacgtgaagctaaggttggagaggtttacactgtacccgttgtccgtattgaaaagttcggtgccttcgtccaccttttcaataagacagatgctctcatccacatctcagaactagcttgggaacgtactgagcatgtcgaagatgtggttaaagttgggggtacggtaactgttaaaattatcaaaatcgatgaaaaaggacgtatcgatgcctcaatcaaggccttgcttcctaagcctgaaaaacttgatgatggggaaaatggaggagagcatcgtcaccgccgtcgttctcatcataaaccacgccaccataatgaaagtggtgaagcaccgaaaaatcctgataaatcagaaacgaaagaacagacagaagaatgacagaaaatcaagaattgcaagcttttgatgaaactctaaaagaatttttaaaggaaccagaccactttttaaccagtctggctttggttaatcacctacaacgtactcccgtcttggctgctcaagacctctacgcagttgaagtggaaggaaagaaggttgttcctgtcttcaccaatgaacaggacctacaatctttcaaagctactcaggagagtgctcgagaacaaatttggatagaacgttcgagcttagatgttttaacacaacttgttcaggcagagctttttggtcttgctttcaatttaaaagaggatggtgatttctcgaataccactctttttgcaagcagtgaactcatccagtttatcaactatttcactcagacccttaataatcttttgggtgaggaaaatcaaaaggcagctcctaaagataagatttatcttgtgccagccttcattcacaaacgcgaggaagatggccaggatgaccgtttctttgcgaccatgtcgaatgcagagggacagagttatgtgcctgtgtttacgaacttaacgagctttacaaaatggtacggtaacgagacttttggcctacctttccgtaaggctaaagggacgattttgcaatggccactgtcagaaatttaccagccttcaacaggtgaaaatgagttggataaggttcaaggtattgtcatcaatccgtttgatgagcagcctgagttagtcgactggtcttattttgaaggggatagcgagtagacctagtgttggtagctttccactttaaaataataatagggccacagcaaacaataataacaataatgatgtaaggagtgacctaaatgggttggtggaaagaaagtattgatatagtaaagaaaaatgacccggcagctcggacgagtctagaggttcttttaacctaccctggattaaaagccttggctgcccatcgtatctcacattttctctggcgccaccattgtcgactcttagcgcgtatgcatagtcagttttggcgcttttggactcagattgagattcacccaggggctcagattgctgaaggtgtctttattgaccatggctctggccttgtcattggtgaaacagctgttgtggagaagggtgctatgctttatcacggtgtcactttaggtggtactggtaaagatgtcgggaaacgtcacccaaccgttcgtgagggtgccttggtttcagcccatgctcaggtcataggccctattgagattggaaagaatgctaaggtgggggcggcagccgtggttgttgcagatgtcccagaagatgttacagtcgttggtgttcctgctaaggttgtgcgtgttcatggtcaaaaggatgaagaagttatccacgatattgaagaaggccgtgaatactatagcgaaaagctagaagatcttctaaaagcagctagctttcattcatcacgtctataaggaaaggaaacgatgaaactctttagttcaaaggtgactcgattgacggttgtgggtcctcttgctcttgtttacattgctttacatagagcagactatagcatggccgccttatggttttgcattgctctgttatgggccggtctggtttttaagcaacgacacaagtgagatttgagtaatgaaaaaattcttcaaggaaaatccttttttggtcttctatatagttgggagttttctttcagctatgtctctcttggctcaaggtcagctagttgcggctatttggattatcattctcgttatactcttgtgtttgtacctaaaccataccaaggataaaaaatagtttccagttaattgaaaggaatctcaagtgattaaaatttatgatacgatgacacgttcgctccgtgattttgtacctttgacagaaaatgttgtcaatatgtatgtctgcggaccaacagtttacaattatattcatatcggaaatgcccgttcagcagtagcttttgatactattcgtcgttattttgagtattgtggctatacagtcaactatatttccaactttacggatgtagatgataagatcatcaaggcagccaatgaagctggtatttcaactaaggaattgtcggacaagtttatcgcggcctttatggaagataccggacaacttggcatcaaaccagcgacacaaaatccacgtgttattaactacatggatgaaatcattacattcgtgtcaaccttggttgacaaaggatttgcctatgtctctgaaggagatgtttacttccgagtagctaagtcaaacaactatgctaaattggctaacaagaccttggaagatcttgaaattggtgcaagcggacgtacggatgctgaaacagaacgtaaggaaaatcctctggattttgccctttggaaagctgccaaagagggagaagtttcttgggacagcccatggggacctggtcgtcctggttggcacatcgaatgttctgtaatggcgactgaaatccttggagatactatcgatattcatggtggaggggcagaccttgagtttccacatcataccaatgaaattgcccaatcagaagccaaaactggcaagaccttcgctaactactggatgcataatggttttgtcaatgtggataatgaaaaaatgtcaaaatccttgggtaacttcgtgaccgttcacgatatgcttcaaacggttgatggtcaagtgcttcgcttcttcctagcgacacaacagtaccgtaagccaattaactttacagaaaaagctatccatgatgctgaagttaatcttaagtatttgaaaaatacccacagtcttccgttgacagaacaggtgaatcaagctgagttgcaaacttatcttgacgctttccaagaagctatggatgatgactttaatacggcaaatggagtgactgttttgtttgacatggccaaatggattaattcaggcaattatgatcaaaccgttaaggatgcttttgaaaaaatgctccaagtcttcggtattgttttcgaagaagaagtccttgatgaagacatcgaaaaactcattgaagagcgtcaagcggcgcgtgctaacaaggactttgcgacagcagaccgtattcgcgatgagttggctgctcaaggtatcaaacttcttgataccaaggagggcgtgaggtggacacgtgactaaacatcttgatgtcaaccttattaacggcattgctcttgcctttgagggagatgctgtttattccttgtacattcgtcgtcacctgatttttcaaggtcagaccaagccaaaccaactgcaccgtctagctacacgttatgtttcagctaaggctcaggctagtctcattgaaaaaatgctagagcaagagcttttgactgaaaaagagctagacatctataaaagaggtcgtaatgcgaatagccataccaaggctaaaaataccgatgttattacctataaaatgtcaacaggcttcgaagcagtcatgggctatcttcatatgacagaggatatcgctcgcttagaggaactgattgcttggtgtattgacgaagttgaaaaagaaatctaaaaattctgccgagagcaggattttttgttatttaaaggctataaaaattgtaacagttagccggaatttcaaaatttagattatttgagaatcaaagtaattcagcgtcttgacaatgaaaaataagatgaaactaatatttagcaccttaaaaatgagaaagttaaggggtatctgacacgtgtaaaaccccgatataatagcgttttttaataaaactaatttgacagaaagtaaaaaaaaagtctataatattagtaaatgaggccatctaaaaaatgaggaggtgaatggaaatagctaagaaaaaagttttctatacaacttttgctgctttgattttatctagctttacgcttcaaacaggtaaagcagatgaggttcaggtaaaacctgatgaagctaaaatagattatgttaatagtgaggcaccggctccagttgctcctcaggctgatttttcttcagtaggagctaaggcagagccagcgagtcaagtaagttcagtagtgacctcaacatcaatgatggttgtctcttcaagtgagacagatgaggggcttcttgaggtgcattctcaagttgatatcgtggagactagcgtttctacgacgacacctcattcagaagaggctcgtgcccaggcttttggtgaggatcgatcagtagcggcatctgaacgaggagatgcaaacccaacatctgattctgaacaagctaaaccaaatattgtacttacttatgataagtctcgtgaggctacagcgactgcagagtctcaagctgtaacttcaatgtataagagtgaaagcacactatacacatctgaacttgctggaaatacacatgcagttattgaaaaatcagagtattcttcactggattctcatacgacatctgtaagtgcgactcctactagccaagctattgcaacttctgaagtcgcttctgagtctgcaagtactgcaagctctcttgcatctaccgctccagaaacgagtcagttaaataataattcagaagatagcttaactgtccttacggttggctggaaagattcatcatcaacttctgaggtctttaaaacttctgaagtggtttctatgttgcaaagtgagagtttgacctattcgtcagaggtaacctttacggatggactcatctcagaaatcttagcgactccaatcacttctgaagtatacaccgttgttccaaaacgagacagtactggagcgcttcttgaagatcaacctgctgttacaggaaatacagatattctttatttagcacgtggtgaaatctttaacgtcaactttgatgttaacaagatggaaggtaagaagattaagggccttaatctagtccttgatggcaaacaaattcatcatagctactttgttgaaggaactttggatgaggtcaatgctggtttgagtgcctaccatttggcagagcaaacgactggtattcataaaatgacctttgagttgattgatacgaataacaatattcattatctgacacagacttttagcgtcttcaatgaaggcgagcgtccagtgacaccggatagttaccgtaggaatcagtattcatcaacaacgacaacaacgactgtaccggttacttataataccagtgcaaatagctacactgaaaccgccaatcatatacaagctacggctgttaatgagttggctgagacaactagagcgctaacacagcaattggcagaacaaattgccgaggttttgagtggttggtcttcagcgatttctggaaatagttcaacaagcacaggttcaattgatatcttccaagcagcaggtaaaaccattactcaagctgcgagaaagattgcagaatcaatctcagatccagatacaattggtaagcaagctttggctgctgcaactgttgttctcgttcttctagtgctttacctagcagcaattacatttatttaacatgctttgccctcgtaagagggctttttttatgatagaattagcttatgaaaacaactaaagaattaagtctagacattgtttatggtgtgcatgccgtaacagagagtctggaagcaaatactggaaataaactctatattcaagatgatcttcgaggaaaaaatgttgatgccattaaggccttggcagctgaaaagaaggtttccatctcttggacacctaagaaaaccttgtctgatatgacaggtggagctgtgcatcaaggttttgttcttcgtgtgtcagagttcgcttattctgagctctcagttattatggataaggctgaacaagaggagaatcctctagtcctcattttagatggactcaacgatcctcataactttggttctatcctacgtacagctgatgctactcaggtgacaggagttattattcctaagcatcgtgctgtgggggtaacacctgtcgttgccaagacatcaacaggggctgtggagcatattcccattgcccgagtgaccaatcttagccaaactcttgataaacttaaagaagcaggcttctgggtatttggaacagatatggatggcaccccatctcataaatggaacacagctggaaaggttgcccttatcattggtaatgaaggtaagggaatctctgctaacatcaagaagcaagtggatgagatgattactattcctatgagtggtcatgtgcagagccttaatgccagtgtggcagctgcagttctcatgtatgaagtttatcgaaaccgattgtaactatgaaaaaaagaatacttctagttgatggttataatatgattgccttttggcaagaaacccgtcaactttttaagaccaatcagcttgatgaagctcgtgaaaccttgcttcgtaagctcaatcattatgctaactttgaacatattgatattatctgtgtgtttgatgcccagtttgttccagggagtcgtcaacgttatgatcaatatcgtatcagtgttatttttactgaggaagatgagacagcagatagctatattgagcgcgcagcggctgagatgaatactgttcaaaatctagttgaagtagcaactagtgacttaaatgaacagtgggctatcttttcacaaggggctttacgtgtttcggcgcgtgagttggaagagcgtgtcaatactgttaagtctgacttagacaagatgtcggcacatattgacttaaagacaccaaaactacgtccatgggacgatgcgcaattagggaaattacaggaccttttaaatgaaatagaatagagggatatatgacatttaacattttgacagattccacagcagatctagatgaaaaatgggctcaggagaataaggtagagctcgttggtttgaccattacgcttgatgatattccctatgagaccgttggccctaaccgtttaacgagtgaccgtctcttagaacgtatgcaagaaggcagtcagccaaccacaagccaggtgaatgttggtcaatttgaagaggtttttcgtcgtcatgctaaaaatggtgatactcttctctatattgccttctcatcagtgctttcaggtacttatcaaagtgctgttatggcacgtgacatgattttggatgaatacccagaagctatcattgagattgtagatactctggcggcagcaggtggggaaggttatctctctatcttggcggcagaagctcgtgatcaaggtaagagcttgtctgaaacgaaagccatgattgaggacattctgccacgtttacggacctatttcttagttgatgatctctaccatctcatgcgtgggggtcgcctttctaagagctcagccattattggtagtttgattaatatcaagcctcttctttggctggacgcttcaggtaagttggttcctctggccaaaatccgtggacgtaaaaaagccattaaagaaatggtcctacaagctacccaggatattggacatagcacagcaattgtcgcttatgccaatgatattgaagcagcgaagaatctaaaagaacaattattagcagttgacggcattgagcaagcgcttattatgccacttggaccagtcatctctacccacgtcggaccagatactttggccgtctttacgattggtaaagaagctagatagaaaaaaagaggtatgttattattaaaaataagaagattgtgttgctctctttgatgatggtaagtctttttgtgagtatgccagcatatgcggcaagtaaaattaagcaagtagatgcaggttttaataagacattcattttaagggacaatggtaaatttgaatatacaaaaccatttagtagctatggagaaggaaatatttcgaatgtacagaaaattgcggctgttggacgtgatggttatgtagccttactaaaagatggaacagtaatcagatcgtcaactttctccaactcaagtttaggttggagtaatattaaagaaattgatacaaatactgatacttctgacgaccttattgttggattgagagaagatggaacggtagttgtaaattcagtgctatttaaagaaaatttttcagaagtagaatcttgggatagtattaaacaaataagtgttggtcaaggagcgatacttggattaaaagaagatggtacagtggtgtctgcaggaacctccacatcaggggcgttagatgtttctgaatggagtgatattgtacaggtaagtgcgggtcacaatttttctgttggagttaaatctgatggaagtgtggttgtgactgatgttaagaattcgtattcttcagattataattcaattttagatcaagtgaaagggtgggataatatttctcagataagtgcaggtgcgtttaatgtaataggattgaaacgagacggaacggtagtggaagctcataggaatagtggtaatgtaaaatatgatatatctggatggacaaatattatccaagttagtgccggatttcaacatattgttgctctttcctcagatggtactgtatatgctaccggagataatgtaatgtcacaaagtgatgtgaaaaatttcaataagaaataactttattcaaaaaaaacacctccaaatgacttgccttggacgtgtttttttgatattatgttaaacggtattgtttaccccatttgaaaggccccggaaccttccaaatacttttcgatgggaaggaacacccatcactcgtaaacaaaaatcgaactatatataggagaaatcatgaacaaaacaacatttatggctaaaccaggccaagttgaacgtaaatggtatgtcgttgacgcaactgatgtgccacttggacgtctttctgcagtagttgctagcgtacttcgcggaaaaaacaaaccaactttcacaccacacactgatacaggtgacttcgtaatcgttatcaatgctgaaaaagttaaattgactggtaaaaaagcaactgataagatctactacactcactcaatgtacccaggtggattgaaacaaatctcagcaggtgaacttcgttctaaaaatgctgttcgtttgatcgaaaaatcagttaaaggtatgcttccacacaacactcttggacgcgcacaaggtatgaaattgaaagtcttcgttggcggtgagcacactcacgctgcacaacaaccagaagtacttgatatctcaggacttatctaattctaagaggaaaggagcactaatataatggcacaagcacaatatgcaggtacaggacgccgtaaaaacgccgttgcacgcgtacgtttggttccaggtactggtaaaatcacagttaacaaaaaagatgtagaagaatacatcccacacgcagaccttcgtctcgttatcaaccaaccttttgcagttacttcaactgaaggttcatacgacgtacacgttaacgttgtaggtggtggatacgctggtcaatcaggtgcgatccgtcacggtatcgctcgtgcacttcttcaagtagatccagacttccgcgattcattgaaacgcgctggacttcttactcgtgatgcacgtatggttgaacgtaagaaaccaggtcttaagaaagctcgtaaagctagccagttctcaaaacgttaattcgttactggacagcagagtacaaacgaaaacactttgcagcttgcaaggtgtttttttgtatagatttctgaaaagtgttcaaaatcttactagagttttgtcttcatcttgaaattcttataacaatgtgatatatttataacagacaaggtgtgatatatttataacatattaaaaagaggtgactgaaatgaaaatgtcgaagaacttaaagataatcctttatatcgctagcgtgcttattgttgtatgtttagtattatttctggggaatcacctaccgattctagcgaaaggtgctattatgacgacggcttggcttccttcgtatttggtttgtacgatggtatcggtcctctcaaaatcaacctatcaaaagaaagaaaaaaacatgtttgggattactgcaaaattatatacagtgcttgtacttctctcgtcctcgatctatactattggagtttggctgctaactcctggttctttgattaagaatataatgttaggaattggattaagtattcaattgttattaatgttttacttcttattcaagagaattaatgaagaacccgatgaacgattttatagaaatattgcaaagtcctcttccattttgtttacaatagcaatctttatattattgggaatggcaaccttgatagctgtctgtaaagttttcgttttgaatgctggattcctttatattttggtggcttttttactcttattatttgccattacttactttatcactgaaaaaaggggatgaaatatggcgaaagaaagtaaaataaagactaacttgaaagaagtaagggaagcttatggtatgactcaacaagatttagcagatcaagtaggaatacggagagaaacgattgttcacttggaaaataaccgctacaacccttcgttggaaatggctttaaaaatagcacaagtctttaataaacaagtagaagaactatttcgtctgaaataagagaagtaaaacaatccaattgatttgtgtatcagtttttggaaacttgttattctgagacgaggtcttggtaagagggagtagtttcaaaggagttatttttgactacatcttagttaaaacgctttcaaaaataagataatagtttatttttcaagcattttaacccaataatagaactttttaggtcgaaatgctctcaaaaatgctaatgtttctctaatctattcacttttgagatcttgcatattatgtagttatcatacaaaaatgataaaagtgaatgaatacatttatttgaaagataatattgttatatacttcaaacatattatcagtaagagggttttatacgtctattaaatatcttttgatttttagccataaaacctcacataataatgaatgtatattttacaaattatgcttttatatatgatttaaatatgtatttaaacttagcaaaggacataataaattacctaaaataacattaaaattaaaaatgattaattattactatttggtaacacacctcaaaaaacctttgtttgtaggaattgtaggatatattaaaaatttaaaaaagtttttaaaatttgttgacatatctctagatagtgttataatctatagatgtcagggaggtcctgatactaaatatataataatccattagaggagaaacaattatgaaaaaagtattgcttacatcagctgcagttcttgcagtattcgcttcatcagcagcagttttcgctaacgacggtaacgttcacactggaaaccttgataacaaaactgaagcaactggtggtgacttcttcacaaacaacgaaggtggtcttactcaagctgctaaagatggtcttaacaacgttgacgcagattcaactaaacaaaaatttgaagatgctggtgaacacatcgaaccaaaacgtgatgctaacggaaacatcatcaaagatgagtttgtagttactgataaagctaacgctaacaaagacgctaaagaagaagctaaagctgttaaagctgcagaaaagaaagctccagcagctaaagctgaagctaaagctcttccaaacacagcagctgttaaataattaactgctattgctaaaaagaatatcactggggctagagcttcggtgatatttttctatggataaagaaaaggatttgacatttcatgagtaatcataatcgtaaatctactggatctcgcaaaaaactgattgctgggatttcagccttagtcattgctgctttggctatcttccttggcttccagtttatgtctccgacagcatcgtcctctaatggtgttaagagtgttttaacgactaaaaaagcaaacacttataaagtttcagatgaggagaaagcctacctcaaaaataaatttgatggtcttgaggcgacaaaccctgatactatcgcttatgtctatgcaccagggactaaattggatgagccagttgttcaaacaacggacaattcaacctacttagataaaacatttgatggaggaaacgttccatatttgggaacggtcttcatggatacagacaataagaaagatttcagcgatcgtttgacttggctcttcggtcatgctcgaggaagtaaggttgctgatagtcgtatgttcaacgatgttaactactatagtgatcagtcatttttcgacaaacacaaatatgttgttattgagacgcctcaacgtaagtattattatgaagcgcttgctatggtaattgtgcctgaagacacagctttctatcgtacatcatttgaaagtgataaagactttaaacaacagttggatatcatctatgatcaagcaagtgttaaaaacaaggatttgaaggttaatgcttcggataaatacctcgttctttcgacttgtcgtgaggaagatgaaacgattcgtgctaatctctacttgcgtcaaattccagactctgaaatgtctgattttgtagctaaacatggtaaagatttggaatacacaccaacacgttaattattaacagaactctacttcgtatgaagtagggtttttatcttgtctaagaaaactgatgttttcaatcgtcatggaattgagatgtaaccgtttattaatcttttttatcatcaatggataagtttttttggtacactagaggtatgaaaaaggagagtattatgaaacagagccaggctaaaaagcgtgacaatgcgatgactaataagattttgatggggttgattgctctcgtcttaggtttgctttttcttgagattttaattgttcatagtaagaacgaacagcaaaagaatgcctcgaacaaagtacagacagcacgtatcatggctaatggggacttgctctatcatgacggtctctatatgagtgcccttcagtcagatggtagctatgatttcacggagaattttacttatgtgaagccgtggttacagcaggctgatttggtcttgggtgattttgagggaacgattaaccctgattatcctttgtcaggctatcctctgtttaatgctcctcaatcagtgacagcagctatcaaggatgctggctatgatgttatggatttggctcataatcatatcttggattctggcttagagggagcttttacaacggctgatgcttttaaaaaagtgggaattgatcctattggtgtttacgaaaagccggtgcgagacaaggcgccacttctcatcaagaatgttaatggtatcaaagttgcaatactttcctatgcttatggttacaatggtttagagtcgaacttgacggataaagaggttgcagaccacttatcgaatttggatgaaaaacgtatgaaagccgagattcagcgtgccgaaaaagaagcagatatcacggttatcatgcctcagatgggtgttgaatatcgtttggaaccgacagatgaacaggttaaactctatcataagatgattgattggggtgctgatattatctttggaggtcatcctcatgtggtagaaccttctgaggtggttaaaaaggatggacagcaaaaacttattatttactcaatgggtaatttcatctcaaaccagcgcatagagaccatggatggtgtggatagtgcagagtggacagagaggggtgtcttaatggatgtcacccttgagaaaaagaatggtcaaaccacgattaagactgctcaagcacatccgacttgggttaaccgtacgcctaaaggaacaacttcgccagagggatatcctttgtatacttaccaaacttatattttagaggatttcattaagggtggtaaatatagaaataaactagatgaagaaaccaaagagcgtatagatactgcttataaagaaatgaatgcccatgttaatttaaaatggaaataaagctaagatatcgcctgaatttggcgatatttttttgtttatcgacaagttacccacagacttatccacaggtgtggaaaagtctgtcgatagtgttgaatcttgatttttcaaggttttaaaagaaggaaattatttaggttgtgaacaagtttatccacaagtagttgggtcagagagaggatatttttataaacgatattagttaaattcctcggaaacattcgtctttttcaagaaaaaagatgcaaatttcataaaaaatagcatttttaatcaaaatatgctaaaattatacaaaataaaatgatggaggcttctcatgaaagcgattattacagttgtaggtaaggacaaagcaggtattgttgcgggtgttgcgactaaggtggcagaacttggcttgaatattgatgatatttctcaaacagttcttgatgaattctttaccatgatggcggttgtatcatcggaagacaaacaagattttacacacctacgtgctgaattggaagcctttggagagtcattgaacgttaaaatcaacatccaaagttcagcaatttttgatgctatgcacaacttgtaagataggagtagcttaaaatggatattaaacaggtcacagaaaccattgccatgattgaggagcagaactttgatgttcgtaccattaccatggggatttcactcctagactgtatcgattcagatatcgataaggcggcggaaaaagtctataacaagattgtatctaaggctaagaatttggtagctgttggtgacgagattgcggctgaacttggtattccgattgttaataaacgtgtgtctgttactccgatctcaatcatcggtgcggcaacagatgcaacagactatgtaccttttgcgaaggcgttagaccgagcagctaaggaaatcggtgttaactttattggtggtttctctgcactcgttcaaaagggctaccaaaaaggtgataagattcttattaattctattccacgtgcgcttgcagagactgattttgtctgctcatctgtcaacattggttcaacaaagactggtattaacatgacagcggtacgtgacatgggacgtatcatcaaagaggcttctgaggcagatccaatgggcccaggtaaattggtggtctttgctaatgcggttgaagataatccatttatggcaggtgccttccacggtgttggtgaggctgatgttgtaatcaatgttggggtttcaggtcctggtgttgtgcaacgtgcagttgagaaagttccgggcgaaagtttcgatgttttagctgaaacagttaagaagaccgccttcaaaatcacacgtgttggtcagttggttggtcaaatggccagcgaacgccttggtgtcgagttcggtattgtagatttgtctcttgcgccaacaccagcagttggtgattcagtagcccgtgtacttgaagctatgggtcttgaagttgttggtacgcatggtactactgcagctctagcccttcttaacgaccaagttaaaaaaggtggtatcatggcatgtaaccaagttggtggtttgtcaggtgcctttattccagtttctgaagatgaaggtatgattgcggcggttcaatctggtcatatcaaccttgaaaaattggaagctatgacagctatctgttctgttggtctagacatgattgctattcctgctgatacgccagatacaacaatcgcggccatgattgctgatgaagcggctatcggtgtcattaatcagaaaacaacagctgttcgtatcattccttatggtaaggaaggtgacatgttggaacttggtggtcttcttggttatgcaccagtaatgaaggtaaacaaagcttcatcggctgacttcattgcgcgtggtggtcaaatcccagctcctgttcacagctttaaaaactaagcggatgttaaatgctttgccaattggtaaggcattttctgatggtctcgctggctagatagtggaggggatttgtgctataatgaattcaaaaatgacggaaagaaggggcgctatgagtgaggttaagttgtatattgcgagacatggcaaaactatgtttaacaccattggtcgtgcacaaggttggtctgatagccctttgaccccgttcggtgaagaaggtattcgtgaattgggggtaggtctgaaagcagcaggtattcctttcaaggtcgcatattctagtgattcaggtcgaacgattcaaaccatggatatcattttacgtgagacgggtttagaaactattccttataaacgtgacaaacgtattcgtgagtggtgttttggtagtttagatggtggctatgacggtgaacttttctacggtgtgctaccgagaacagatgcttttcaaggtaaggatttgcatgaggtaacttatcctgagcttgcacagggtatccttgatgtggatacggctggttgggcagagccttgggaagtgctcagaaaacgtattttagaggggttcacagctattgcagaaaatcttgagaggtctggtggcggtaatgctattgtcgttagtcacggtatgaccattgcaacctttgcttggttaattgattcttctgtcgagcatccttcattggacaacggttcggttactgttgttgcttatgaaaatggtaaatttacattagaagcacttggcgatatgacttatcgtcaggttgggcgagagataatagaaaaagaaaatggtaaaaaataactatccaagtcgccgtcaggcgaaaaagcaaaccaactggtttttggttatcagtagtgtcttgattgcagttcttttagttgtagcaggactttattcagtatttggtgtcagtcgtacagtccaacaaaccaatggatcgtcagtaacaaaaagtagtaagcaagctaccgatgcgactcaaagcaaggatgcaaagggactacctgatgtatcgcctaaagactggcaattgcttttggtaaatcgagataataagtctaaagaacttaaccctgagattgctgatgtcgatggtgtttctgtagatgcaagaattgctaagaacgttaaggagtttttagcagctgctcaagaaattgatccaagttatcacttgatatcaggttatcgtagtgttgcttatcagactgaactttataacagttatgttcagcaggaaatggctgctgacccaagtttgacggagtctcaggcggagaaaaaggttcaaacctattcacaaccaccaggagcgagtgaacaccaaacaggtcttgcgattgatatgagtactgtagatagcttaaatgaagcagatccagatacagtagctaaagtcaaagaattggcgccgaaatatggctttgttcttcgttttccagatggtaaaacatcgtcaacgggtgtaggctacgaggattggcatttccgctatgttggtaaagagtcagcagagtatatgactgaacataatcttactttggaagaatatttggcattattaaaggagaaagctaagtgagacgacgttttaaactaaaagccttcattaccttagttgttgtttttgctttaggtattctcttacctttgattcttcatgcctctacagatgataatgctcgtgcggtaaaggttgcttacacacagcaagaatttattgagaccttagctccaacagctcaaaagatgtctaaaaactatggtgtacctgcgtctattctccttagtcaagctgcatatgagtcaaattatggtagcagtcttttatctgttaaatatcataacatctacagtctccctgctcagccaggtcaagaacgtattcgtttaaaggatagtatctacagtaaagggaaatggcaataccaaaaggtggattttgcagtttttaaggattggtcaagttctatgatgacttatttagaagaacttcgccaaggaacatggggcgagtcgacctataaagaggtagcaggaacgactagttataaagttgcggcagaaaaactacaagctgcgggttttagcagtgatccagattatgccaaacacctcatatctattattgagacctatcatttgtcaaaatatgattgataagattagagtgcctctgaggtgctctttttttgcttttctaggtcttaagatgtatttttagcactctttttataagagtgctaattttttggttttttgggttgacatgttcaagtttaggtgtataatagaatcataagttagcagtcgatgtgttagagtgctaataaatagaaatgaggtgacatcgtgattacgcaaaggcaaaacactattttgaatttgatagttgagatgttcactcgtacacatgaaccggttggttctaaagcattacaagaatcaattgattcgagttcagcgaccattcgtaatgacatggccaagcttgaaaaaatgggctatcttgaaaaagctcatacttctagtgggcgtatgccaagccgagcaggtttccagtatttcgtcgctaattctttgaatcttgatacgattgatcaacaagatgtttatcaagtggtcaaggcctttgattttgaagcctttaaacttgaagatatcttggatgcagcggcgaagctgctggcagaaatgacaggatgtacagcagtgattcaagatgtggaaccgacacgacaacgtctgactggatttgacattgttcatctatccaatcacgacgctttagcggttcttactctagatgaatctaagcctgtgacagttcaatttgctattccaaaaaatttcttgtctagtgatttggaaattcttcataagcttgttcaagaacgttttttgggaaacactgtcttagatatccattaccgattgagaactgagattcctcagattgtgcaaaagtatttcaaaataacagataatgttttagacttgtttgattatatcttttcacaactttttaaggaattgattttcatcgaaggtaaggttgcatcattgacttatgccgacttaaaaacctatcaatttttggacaatccacaacatgtggcacttgagcttcgatcagctatctccgatgatgaagtgaccaagatttcggttgcagaatcaactgaagaagcgcttgaaaatgtcacagttatgagtcataaattcctgattccttatcgtgggatggcactcatgcatgtgattggtccagttgaaatggattatcgtcgcatggttagtttggtcaatgttattagtagagttttggttatgaagttgacggattattaccgttacctcaatagtaaccattatgaagttagctaagatataacatttaaaaagtatagaaagaggtgtatgccttgactgaagatattaaaaaagaagaagtgaaagaagaggaagctacggagacaactgaagaagttgtagaggaagtaagcgaaccttctgaacttgaagaagcccaagcgcgtgccgaagaatttgaaaacaaataccttcgtgcccatgcagaaatgcaaaacattcagcgacgtgcaaatgaagaacgtcaacaattgcaaaagtatcgtagccaagatctggcaaaagcgattttgccatcacttgataaccttgaacgtgctcttgccgttgagggcttgactgatgatgtcaaaaaaggtttggaaatggtgcaagaaagtttagtgcatgctcttaaagaggaaggaattgaagaaattccagcagatggtgatttcgatcataacttccatatggcaattcaaacaatgcctgcagatgatgaacatccagcagacacgattgcacaagttttccaaaaagggtataaactccacgaacgcgtcttacgcccagctatggtagttgtatataattaattgaaaacttgtccgaaatgacagaaaactatgaatgaaagataaaaaagcaaaatagaaattaaagtaaaaaggggaaaaacatatgtctaaaatcattggtattgacttaggtacaacaaactcagcagtagcagttcttgaaggaactgaatcaaaaattatcgcaaacccagaaggtaaccgcacaactccatctgttgtgtcattcaaaaacggtgaaatcatcgttggtgacgctgcaaaacgtcaagcagtaacaaacccagatacaatcatctctatcaaatctaagatgggtacttctgaaaaagtttctgcaaacggtaaagaatacacaccacaagagatttcagctatgattcttcaatacttgaaaggttatgctgaagattaccttggtgaaaaagtaactaaagcagttatcacagttcctgcttacttcaacgatgcacaacgtcaagcaacaaaagacgctggtaaaatcgctggtcttgaagtagaacgtatcgtcaacgaaccaacagcagcagctcttgcttacggtttggataagactgataaagaagaaaaaatcttggtattcgaccttggtggtggtacattcgacgtatctatccttgaacttggtgacggtgtctttgacgtgttggcaactgcaggggataacaaactcggtggtgacgactttgaccaaaaaatcatcgactacatggttgaagaattcaagaaagaaaatggtatcgacttgtcaacagacaagatggcccttcaacgtttgaaagatgcagctgaaaaagcgaagaaagacctttctggtgtgacttcaactcaaatcagcttgccattcatcactgcaggcgctgctggacctcttcacttggaaatgaccttgactcgtgcgaaattcgatgatttgactcgtgaccttgtagaacgtacgaaaactccagttcgccaagccctttcagatgcaggtttgagcttgtcagatatcgacgaagtcatccttgtaggtggttcaactcgtatccctgccgttgtagaagctgttaaagctgaaactggtaaagaaccaaacaaatcagtgaaccctgacgaagtagtggctatgggtgctgctatccaaggtggtgtgatcactggtgacgtcaaagacgttgtccttcttgacgtaactccattgtcacttggtatcgaaacaatgggtggagtcttcacaaaactcatcgaccgcaacactacaattccaacttctaaatcacaagtcttctcaactgcagcagataaccaaccagccgttgatatccacgttcttcaaggggaacgcccaatggcagcagataacaagactcttggacgtttccaattgactgatatcccagctgcacctcgtggtatcccacaaatcgaagttactttcgatattgataagaacggtatcgtatctgttaaagctaaagaccttggaactcaaaaagaacaaacaattgtcatccaatctaactctggtttgacagacgaagaaattgaaaagatgatgaaagatgctgaagcaaatgctgaagcagatgcaaaacgtaaagaagaagtagatcttcgtaacgaagttgaccaagctatctttgcgactgaaaaaacaatcaaagaaacagaaggtaaaggcttcgacacagaacgtgatgctgctcaatcagctcttgatgaccttaagaaagctcaagaatcaggcaatcttgatgacatgaaggctaaattggaagctcttaacgaaaaagctcaagctcttgcagttaaactttacgaacaagctgcagcagcacaacaagctcaagcaggagcagaaggtgcacaaacagcagacaactcaggcgacgatgttgtagacggagagtttactgaaaagtaagatgcaaagtccgttaaagcctcacagtgaaaataggaagatttctctttttcaccaagaggttagggcgtgctcagttcggtaaggtgttgagcttagctagtaaatgataaaaagaaatccagaggttgcaaaccagcctctgtttttcggtaaaatagaggatgtcgcttatgaaaaaagtgctttgtatcatttatcctaatttttctctctacgagatagcctctttaacgagtactttagctctgtctttcgatataacgattgattatgtagcctcagattattcgattgtggtatctgaggacggcttgccctgtcaaccgacgaaaacattggatcaagtacgtatagaagattattcttgcgtgattttgccaggaatggtcaacataggacctgccctacaggatgagaaattgatttcgttcttgaggggccttggtgagcaaggtatcctcattgcagccatttcttcagcgcctcttttattagcaaaagcaggtctgttgaaggacacgaaatttacaggtggaatttggcaaaacttctttgactattttgaatttcttccacgtgaaaatttccaacctaaagtggttgtacaagataaaaaaatcattacagccataggctttgcacatcaagagtttgcaagaaaagtgattcttagtctagggttgtcagattatacggacaactattttaaagaacagaacgagtacgctgaagaggatttgatatttactctatcagacgaagagtttgatgaagtgaagcgaagtatagaaaagaccctctaaagatttacatgaaaattatagaaaggaacaaagagtgttcgaggaattgaacacgagcggaaagctaggaaattagataaacctcctaagaaatcatgatttcttgtcggtttcctaaatttcagtcgctttctgttcgctcttagtatcttgtatgaacaataccgaatattacgatcgtcttggggtatctaaggatgcctctcaagatgaaattaaacgtgcctatcgtaagatgtctaagaaataccacccagatattaataaagaaccaggtgcggaagaaaaatataaagaggtccaagaggcctatgaaactttaagtgatgaccaaaaacgtgcagcctatgaccaatacggaccagatggtgcgaatggttttggaggtcaaggaggctttggtggcttcgatggtggtgcaggctttggtggctttgaggatatcttctctagcttctttggtggtggtgctactcgtaacccaaatgctccacgtcaaggtgatgatcttcagtaccgtgtcaacctaagcttcgaagaagcgatttttggtgccgaaaaagaagttcactacaatcgtgaagcaacatgtaagacatgttcgggatctggtgcaaaacctggaacaagccctgtaacttgtggtcgctgtcatggtcaaggggttatcaatgtcgatacgcaaacaccacttggtatgatgcgtcgtcaagtaacctgtgatgtctgtcatggaacaggtcaagaaattaaagagccatgtcaaacttgtcatggaacaggacatgaaaaacaaagccataaagtatctgtcaagattccagcaggtgttgaaacaggtcaacaaatccgtcttgcgggtcaaggtgaagctggtttcaatggtggtccttatggagacctctttgtaatcatcaatgttaatccaagtgataagtttactcgtgatggatcaacaatttactatacacttaacatttcctttgtccaagctgctcttggtgatactgtcgaagtaccaacagttcacggaaatgttgagatgaccattccagcaggaactcaaacaggcaaaactttccgtctaaaaggaaagggtgctccacgtcttcgtggaggttcacaaggagaccaacacgttacagttaagattgtaactcctacgaagctaaacgatgctcaaaaagaagctctccttgcattcgccaaggcaagtggagatgaaaaaatcgcaccacagaaaaaaggtttcttcaataaagtaaaggatgccttagaagatttataaaggaaggacgctgaaggcgtctttttctttatgtcaaaaaattgtctggggtcagttgctaatcgacctactttttatccttgaaaaaatctgatatgataattttatggttagatacaaagcgataatttcctatgatggtacacttttctcaggttttcaaagacaaccaaatgcacgttctattcaagaagagcttgaaaagactcttttacggttaaatagtggtacacctgtcaccgttcatggagcggggcgtacagatgcaggtgttcatgcctatggacaagttatccacttcgacttgccccagaagcgggatccagagaagttacgttttggtttagatacgcaatgtccagatgatattgatgttgttagtattgaacttgtatcagaagaatttcatgcacgatacaataaacatagtaaaacttatgagtttctagtagatgcaggacgacctaagaaccctatgatgcgtaattatgcgacccactatccctaccctttaagtttagcacctatgcaggaggctgctaaggatttggtcggcacacatgattttacaggcttcacagcttcaggaacttctgtagaaaataaagtacgcacaattacacaagctagtgtatctatcgatgagaaaactggattttatatctttactttttctggcaatggttttctctataagcaagttagaaatatggtcggcaccttgttgaagattggaaatggtcgcatgcctgtttcgcaagttaagacagtgttggaaagtcgtaatcgtaatcttgcaggaccaacggcagcaggaaatgggttatatttgaaggagattagatatgagtgatgaattgattttagcgatttcagggaatgatatttttagtggtggcggacttcatgcagatttagcgacatttaccactaataaacagcatggatttgtggcccttacctgtctaacagctatgactgagaatggttttgaggtcattccggttgatactaatgtttttaaacaacaacttgactcactaaaagatgtcccattttcagcaattaaaattggtttgttgcctaacgttgaaatcgcagaattaacgttggattttgttaaaaaacattctgatattccaattgtcttggatcccgttttagtatgtaaggagactcatgacgttgaagtttctcaactacgtgatgaattggttaaatttttcccttatatcacggttatcactccgaacttacctgaagtcgaactgcttatagatagaaaggttaagactcttgatgatatgaagcatgccgctagctatctcaatgaattaggtgctaagactgtcgttgtcaaaggtggaaaccgcttggatggtaataaagcgatagatgtcttttatgatggaacagattacaaattgtttgaagaagctgtgctagacaaaaacaataccggtgcagggtgtacatttgcttcgagtatagctagtgaattagttaaagggtgttcagaaactgaagctgtggcaaatgctaaagcctttgtttatgaatcaattaaacaatcaaatgaatttggagtagttcaatatgcaaaataagaaaacaaaagagctaacattattagctatcttaacagctttatcagtgacctttggattcgtagctaaaattccgactccaacagggcttttaactttggtagatgcaggaatctacttcacagccttttatcttggcaagaaagaaggggcaattgtgggaggactatctgcatttttgatagatttgctatcatctgctccgcaatggatgtttattagtttgttaatccatggtgcacaaggttattttgctggatttaaaggtaactatcgtatcctaggccttctgattgctacaattgtgatggtgggtggttatgcacttgcttcagtatttatgtatggaacaggagcttcaatcgcagaagtgattcctaatttctgccaaaatgctcttggcctagtcgttggatgggtattgtatcaaggattcaaaaaagttcaatcaaaaaaagattaatagctttactaaaccctattgacaagcattgatttgggtgataagatataaaagttgtcttaactgacttgccacaaacttgaaaaggttccaaaactttaaaaaagttattgacaagacaggtcagagatgatattataaataagctgtttcgggagagacagcggacacgagaagtaaaaaaacttcaaaaaagtgttgacaaggtattctagatttgctagaatatagaagttgtcttaagagagacaaagacctttgagaactgaataagaaaccaagtgcagggttatgatagaagaattataacctgtcaatttacaagaataaatcgtcagacgacggtaatgagttaacgctcgaacaattattaaattttttaatgagagtttgatcctggctcaggacgaacgctggcggcgtgcctaatacatgcaagtagaacgctgaagagaggagcttgctcttcttggatgagttgcgaacgggtgagtaacgcgtaggtaacctgccttgtagcgggggataactattggaaacgatagctaataccgcataacaatggatgacacatgtcatttatttgaaaggggcaattgctccactacaagatggacctgcgttgtattagctagtaggtgaggtaacggctcacctaggcgacgatacatagccgacctgagagggtgatcggccacactgggactgagacacggcccagactcctacgggaggcagcagtagggaatcttcggcaatgggggcaaccctgaccgagcaacgccgcgtgagtgaagaaggttttcggatcgtaaagctctgttgtaagtcaagaacgagtgtgagagtggaaagttcacactgtgacggtagcttaccagaaagggacggctaactacgtgccagcagccgcggtaatacgtaggtcccgagcgttgtccggatttattgggcgtaaagcgagcgcaggcggtttgataagtctgaagttaaaggctgtggctcaaccatagttcgctttggaaactgtcaaacttgagtgcagaaggggagagtggaattccatgtgtagcggtgaaatgcgtagatatatggaggaacaccggtggcgaaagcggctctctggtctgtaactgacgctgaggctcgaaagcgtggggagcgaacaggattagataccctggtagtccacgccgtaaacgatgagtgctaggtgttggatcctttccgggattcagtgccgcagctaacgcattaagcactccgcctggggagtacgaccgcaaggttgaaactcaaaggaattgacgggggcccgcacaagcggtggagcatgtggtttaattcgaagcaacgcgaagaaccttaccaggtcttgacatcccgatgctatttctagagatagaaagttacttcggtacatcggtgacaggtggtgcatggttgtcgtcagctcgtgtcgtgagatgttgggttaagtcccgcaacgagcgcaacccctattgttagttgccatcattcagttgggcactctagcgagactgccggtaataaaccggaggaaggtggggatgacgtcaaatcatcatgccccttatgacctgggctacacacgtgctacaatggttggtacaacgagttgcgagtcggtgacggcaagctaatctcttaaagccaatctcagttcggattgtaggctgcaactcgcctacatgaagtcggaatcgctagtaatcgcggatcagcacgccgcggtgaatacgttcccgggccttgtacacaccgcccgtcacaccacgagagtttgtaacacccgaagtcggtgaggtaaccttttggagccagccgcctaaggtgggatagatgattggggtgaagtcgtaacaaggtagccgtatcggaaggtgcggctggatcacctcctttctaaggaaaaacggaatgtacttgagtttcttatttagttttgagaggtcttgtggggccttagctcagctgggagagcgcctgctttgcacgcaggaggtcagcggttcgatcccgctaggctccattgaatcgaaagattcaagtattgtccattgaaaattgaatatctatatcaaattccatatgtaattaaatacatatagatagtaacaagaaaataaaccgaaacgctgtgaatatttaatgagttaggtcgaaagaccaaaataaggttaagttaataagggcgcacggtggatgccttggcactagaagccgatgaaggacgtgactaacgacgaaatgctttggggagctgtaagtgagcaatgatccagagatgtccgaatgggggaacccggcaggtaatgcctgtcactcattactgttaaggtaatgtagaggaagacgcagtgaactgaaacatctaagtagctgcaggaagagaaagcaaaagcgattgccttagtagcggcgagcgaaacggcaagagggcaaaccgaagagtttactcttcggggttgtaggactgcaacgtggacttaaagattatagaagaactacctgggaaggtaggccaaagagagtaatagcctcgtattcgaaatagtctttatacctagcagtatcctgagtacggcgagacacgagaaatctcgtcggaatctgggaggaccatctcccaaccctaaatactctctagtgaccgatagtgaaccagtaccgtgagggaaaggtgaaaagcaccccgggaggggagtgaaatagaacctgaaaccgtgtgcctacaacaagttcgagcccgttaatgggtgagagcgtgccttttgtagaatgaaccggcgagttacgatatgatgcgaggttaagttgaagagacggagccgtagggaaaccgagtcttaatagggcgcattagtatcatgtcgtagacccgaaaccatgtgacctacccatgagcaggttgaaggtgaggtaaaactcactggaggaccgaaccagggcacgttgaaaagtgcttggatgacttgtgggtagcggagaaattccaaacgaacttggagatagctggttctctccgaaatagctttagggctagcgtcgatgttaagtctcttggaggtagagcactgtttgggtgaggggtccatcccggattaccaatctcagataaactccgaatgccaacgagatataatcggcagtcagactgcgagtgctaagatccgtagtcgaaagggaaacagcccagaccaccagctaaggtcccaaaatatatgttaagtggaaaaggatgtggggttgcacagacaactaggatgttagcttagaagcagctattcattcaaagagtgcgtaatagctcactagtcgagtgaccctgcgccgaaaatgtaccggggctaaaacatattaccgaagctgtggatacctttataggtatggtaggagagcgttctatgtgcgaagaaggtgtaccgtgaggagtgctggagcgcatagaagtgagaatgccggtatgagtagcgaaagacaggtgagaatcctgtccaccgtaagactaaggtttccaggggaaggctcgtccgccctgggttagtcgggacctaaggagagaccgaaaggtgtatccgatggacaacaggttgatattcctgtactagagtatatagtgatggagggacgcagtaggctaactaaaccagacgattggaagtgtctggccaagcagtgaggtgtgatatgagtcaaatgcttatatctataacattgagctgtgatggggagcgaagtttagtagcgaagttagtgatgtcacactgccgagaaaagcttctagcgttaattatactctacccgtaccgcaaaccgacacaggtagtcgaggcgagtagcctcaggtgagcgagagaactctcgttaaggaactcggcaaaatggccccgtaacttcgggagaaggggcgctgacttatggtcagccgcagtgaataggcccaagcaactgtttatcaaaaacacagctctctgctaaatcgtaagatgatgtatagggggtgacgcctgcccggtgctggaaggttaagaggagtgcttagcaatagcgaaggtatgaattgaagccccagtaaacggcggccgtaactataacggtcctaaggtagcgaaattccttgtcgggtaagttccgacccgcacgaaaggcgtaatgatttgggcactgtctcaacgagagactcggtgaaattttagtacctgtgaagatgcaggttacccgcgacaggacggaaagaccccatggagctttactgcagtttgatattgagtatctgtaccacatgtacaggataggtaggagcctatgacctcgggacgccagtttcgagtgaggcgttgttgggatactacccttgtgttatggctactctaacccagataggttatccctatcggagacagtgtctgacgggcagtttgactggggcggtcgcctcctaaaaggtaacggaggcgcccaaaggttccctcagaatggttggaaatcattcgcagagtgtaaaggtataagggagcttgactgcgagagctacaactcgagcagggacgaaagtcgggcttagtgatccggtggttccgcatggaagggccatcgctcaacggataaaagctaccctggggataacaggcttatctcccccaagagttcacatcgacggggaggtttggcacctcgatgtcggctcgtcgcatcctggggctgtagtcggtcccaagggttgggctgttcgcccattaaagcggcacgcgagctgggttcagaacgtcgtgagacagttcggtccctatccgtcgcgggcgtaggaaatttgagaggatctgctcctagtacgagaggaccagagtggacttaccgctggtgtaccagttgttctgccaagagcatcgctgggtagctatgtagggaagggataaacgctgaaagcatctaagtgtgaagcccacctcaagatgagatttcccatgattttatatcagtaagagccctgagagatgatcaggttgataggttagaagtggaagtgtggtgacacatgtagcggactaatactaatagctcgaggacttatccaaagaaagtaactgagacatattgacaacgatttggtttcttgatacagtatagatattcaattttgagttgagaatactcagagttaagtgacgatagcctaggagatacacctgttcccatgccgaacacagaagttaagccctagtacgcctgatgtagttgggggttgccccctgttagatacggtagtcgcttagcgtttatccgccatagctcagttggtagtagcgcatgactgttaatcatgatgtcgtaggttcgagtcctactggcggagtatagatttcattgctggacgtaggtctagctttttttttgtttttatcaccttttatagtgacatatatgtcactattttatttcttatttatctcttataataggtctcgtaattaatttaattacaaaaattatatctattaataggaggttgaatggaacaagaagtttttgttcacgcatatgaggttgttaggccgattgtacttaaggctagtcgacaatatttcatccaactttgggaccaagctgatatggagcaagaagctatgatgacgctttatcagcttttagaaaagtttcctgaattaaagtctgatgatgataagttacggcgttattttaaaacgaaatttaggaatagacttaatgatgaggttagaaggcaggagtctgtaaaacgacaagccaatagacaatgttatattgaaatttcagatattgctttttgtcttccaaataaagagttagatgctgttgataggcttgtttatgatgagcagcttaatgctttccgtaatcagttgtcttcggaagatgctactaagttagaccgtttgctagctggggagtgttttagaggtcggaaaaagatgattcgagagttaaaattttggatggttgattttgatccttacaatgaagatgattaattcttaatatagaaccttgactggcaatattgtttaatatgaataaaaaacacttcgaaagtagattcatcttatctatcttttgaagtgtttttaatgtaatgaatttattttactgctatagggtttccaataaatcttggaagttcaatattttctttgattagggcttcctggtaaagtttcaagaagtctgcatagatatgagtttgttgtccattttttgtaaagatatcaatacgaaataccagttgtccagaaggagttgtgcttaatccaatgatatttggtgctccacagatttgaggatagttttcaatgttttcttgatttacttcttggatgatgcttgtcaccttattgatatcggttgacggatagactgggatatcaatttgagctctcatatcccctcgagatttgttggatacaattgtgatatttctgttaggtataaagtggagagttccatcaaatcctcgaatttgagtagttcgaatacctacggttgaaataaggcctgtaacgggtcctacttcaactgagtcaccgacttcaaattggttttctaacaagatgaaaaaaccattaacgacatctgataggaagccttgagctcctagaccaagagcaaccccagcaagtcctgcaccagcaaggaggctagatactggaaccccaaggatactaagaagccagtaaacaaggaaaaagtatagcacgtagttcatgcaattgtgtagtaaacgttcaatggttttttgtcgagcaggtgtttgaattgtccaagctagagagcgtccaactgtatgtttaaaaaggaagttgataatcttcttactaagaagaaagatgatgagaagaatgaggagcttaatcccttttgtaatgagtaccattagggtctcttcaaaattaaattgttggatgtatctttgtaaaatattcatagctttagtttatcaaaaatttgaaaaagtaacagttcctaacgattttcttgtgattaaattggagaaaaaaacttttaaaaggctttgaaatatggtaaactaaactgtatctataaaaaattttaaggagaatgactacatgtctgtatcatttgaaaacacagccactaaccgtggtgtggtgacattcactatcggtcaagataaaattcaaccagctttggatcaagcgtttaacaaggttaaaaagaatttgaacgctccaggcttccgtaaaggacacatgcctcgtgccgtatttaaccaaaaatttggtgaagaagctctttacgatgatgctttgaatgcaattcttccagcagcttatgaagcagcgattgctgaacttggtcttgatgttgttgcacaaccaaaaattgatgtaaaatcaattgaaaaaggtcaagattggacacttactgcagaagttgttacaaaacctgaagtaaaacttggtgcatataaagatcttgaagtttcagttgaagcttctaaagaagttactgatgaagaagttgatgctaagcttgaaaacgaacgcaaaaacttggctgaattggtcgttaaagaaggtgcagctgaaaatggcgacactgttgttatcgactttgttggttcagtagatggtgttgaatttgacggtggtaaaggtgaaaaccactctcttgaacttggttcaggtcaatttatcccaggattcgaagaccaattggttggagcaaaagctggtgatgaagtagaagttaaagtaactttcccagaagactatcaagctactgatcttgcaggtaaagctgctgtatttgttactaaagttaacgaagttaaagctaaagaagttcctgctcttgatgatgagttggctaaagatcttgacgatgaagttgaaactcttgatgagttgaaagctaaataccgtaaagaacttgaagcagctaaagaaatcgcatatgatgacgctgttgaaggtgctgcacttgatttggctgttgaaaacgctgaaatcgttgaattgccagcagaaatggttgaagacgaagttcaccgtgctatgaacgaattcatgggtaacatgcaacgtcaaggtatctctcctgaaatgtacttccaaatcactggtacaactcaagaagatcttcacaaacaatatgaagctgacgctgacaaacgtgtgaaaactaaccttgttatcgaagctgttgctgctgctgaaggattcgacgctacagaagaagaaatccaaaaagaaatcaatgatcttgcagctgagtacaacatggaagtatcacaagtttctgcacttctttcacctgaaatgcttaaacacgatatcactatgaagaaagctgttgaagttatcacaagcacagcaaaagttaaataatatgactaaaatcaagtttctgttgagacttgattttttcttctataaatgctttgactattgactctttttagcgtaaaataaaaggtagcgaaaaattgattgctgagctatttctgatggaaactagcttgagtaagaatgaaggagaaccactttggaactagacgtatttgctggacaagaaaaaagtgaattatcaatgattgaagtggcccgtgctatcttagaaacacgtggtcgtgataatgaaatgtatttcaatgatttggtcaatgaaattcaaaattacttagaaaaatcggatgctgatatccgcaatgctttgccattcttttattcagatttgaatacggatggaagtttcattccactaggtgataacaaatggggcttgcgttcatggtatgcaattgatgaaatcgatgaagaggtcatcacattggaagatactgatgaaaatgcaccaaaacgtaagaacaagaaagttaatgccttcatggatggtgatgaagatgccatcgattataatgacgatgatccagaagacgaaaacttcacacctgattctgatagtcttgaatatgacgacgatagcgaagatgatgagaaagccgaagtggaatcttatgactctgagttgaatgaaattattccagatgatgatttggatgatgttgagttgtcagaagaagatgatgacgatgactatgaggatgagtcaaacgactaagttttcattgacaaatggtcttggatagtttagactatttatcgggcacctcttttgaagaggtcatgattaaggctcccagagtgaaactcttgggggtcatttttgtttttagtcatttactggacttgtctaaggtgaggtactttgtactgctccaatcaggtactaggaaagggctgtcgtgattatttgagtgggtaatcaatctactatctgtacttgttttgaataatattataaggagttaacatgacaaaatatattttcgtcactggtggtgtggtatcttcaattggtaaagggattgtagctgcaagtcttggacgtttgcttaagaaccgtggtcttaaggttacgattcaaaaattcgatccttacatcaatattgacccagggacaatgagtccttaccaacacggtgaagtttatgtcactgatgatggtgctgaaactgaccttgaccttggtcactacgaacgttttattgatatcaatcttaataaatactctaacgtgactactggtaagatttacagcgaagttttgcgtaaggaacgtaaaggggagtatcttggtgcgactgttcaggtgattccgcatatcaccgatgctttgaaagacaagattaagcgtgcagcgacaacgactgattcagatgtcattatcactgaagttggtggtacggttggggatattgaaagtcttccattccttgaagctcttcgtcaaatgaaggctgatgtgggttctgataatgttatgtatatccacacaacgcttcttccttatttgaaggctgctggtgaaatgaagacaaaaccaacgcaacactctgttaaggaattgcgtggtttgggtatccaaccaaatatgttggttattcgtacagaacaacctgctggtcaaggaattaagaataaattggctcagttctgtgatgttgcacctgaggctgttatcgaatcactcgacgtggaacatatctatcaagtgccacttaatatgcaggctcaaggtatggatcaaatcgtttgtgatcatttgaaactagatgctccagctgcagatatgacagaatggtctgctatggttgataaggtacttaatcttaagaagacaactaagattgcccttgtcggtaagtatgtggagcttcacgatgcttacttgtcagtggttgaagcacttaaacactctggtttggcaaatgatactgctattgatattgactgggtcaatgctaatgatttgactgctgaaaatgttgcctctcgtttggctgatgctgatggtatcatcgttcctggtggttttggtcaacgtggtactgaaggaaagattcaagctattcgttatgcacgtgaaaatgatgtgccaatgttgggtgtctgtcttggtatgcaattgacatgtattgagtttgctcgtcatgtccttaacttggatggcgctaattcagctgagcttgatccaaacacaaaatatccaattatcgatattatgcgtgatcaaattgacattgaagatatgggtggtactcttcgtctcggtctttacccatgtaagttgaaaccaggttctaaggcagctgcagcttatggtaatcaagaagttgttcaacgtcgtcaccgtcaccgttatgaatttaatactaagttccgtgaacagtttgaggctgagggctttgtattctcaggtgtgtcaccagataatcgtttgatggaagttgtagaactcccagacaagaaattctttgtggcagcgcaataccacccagaataccatagccgtccaaaccatgctgaggaactttacaccgcctttgtgacagcagcggttgaaaatgctaaataataaactaggacagagtggggcagcctactctgttttttattggctccttttatgctaaaataaagggaataataagaaagaacgaggaaaacaaatggctaaattcggctttttgtcagtattagaagaagaattggataagcacctggactatgatttcgctatggactgggataaaaagaatcacgctgtagaagtaacgtttatcctagaagcacaaaacagtagcaatgtggagactattgatgataagggtgaagtgtctgatgaagatgtcatttttgaagactacgtgctcttttacaatccagcaaaatcacgttttgatgaagaggactacctagtgacaatcccatatgaacctaagaaaggtctatctcgtgagtttttggcctattttgcggagactttgaatgaggtggcgacagaaggattgagtgacttgatggattttctatctgatgatggacctgaggaattcggtttggtttgggacaaagaagctttcgaaaaaggggaagctcaacttgaagagaaggaattttttgcttatccgaggtattaaagggagcgaaaaaggatggatgcttatttaaaaaatcagtttgattttacaggtgttaaggtttccttactcgtagcgcaaagtattttggttattcttagagataataaaccagatattccttggccaaatacatgggagttgccaggtggtggaagagaaggtcaagaaacgcctcttgaatgtcttcaacgtgaggtctgggaggagcttggattggctctgaaagaggaatcgattatttggtcgaaaatctatcctagtatgttggataaagataggtcagccgtttttgtggttggccaaattagtcaagagcagtatcgtgagattcattttggtgacgaggggcaggaatttaaactaatgcctgtagaggattttataaaagcagaaggtgtcattccccagttgcaggaacgttttaaagactatttatcagaaaaggaagaaaataatatatggacaaatggcaagaactaacgattgaagttaatcgtgaggtcgaagaggcggcttctaatattttaattgaatctggtagtcaaggtgtggctattgatgatagtgcagattatttggaaaatgcagaccgttttggtgagctttatcctgaggttgaacaggttgagacggttaaaattacggcttattatccggagtcagcagatatcgaagctattactaagcaggttaatgagcgtttggctgagttgacagattttggtcttgaaactggagatattcacttggctactcaagaattggttgaagaagactgggctgagaattggaagaagtactatgaaccagctcgcattacccacgatttgactatcgtaccgtcatggacggattatgaggcatcagtaggtgagaagattatcaagctagatcctggcatggcctttggaaccggaacacacccaacgactaagatgagtctttttgcactcgaacaggtgcttcgtggtggcgagacggtgattgatgtgggaactggttcgggtgtcctctcgattgctagttctcttcttggagctaaggaaatctatgcctatgaccttgacgatgtggcggttcgagtggcacaggaaaacattgatatgaatcctggcatggaaaatatccacgttgctgaaggtgatcttttgaagggtgtaactcaagaagctgatgttatcgtggctaatattttggcggatattctcatccatctgacggaagatgcctaccgtttggttaaggacgaaggttatttgattatgtcagggattatctctgaaaaatgggatatggtgcgtgcatcggctgagaaagcaggtttcttcctagaaactcacatggttcagggagagtggaatgcttgtgtcttcaagaagacagatgatatttcaggtgtgattggaggctaaatgcaacagtattttataaaggggcaagttgaaaatccagtaactatcaaagacaaggatactgtaaagcatatgtttaacgttatgcgtttaacagaggatgatcaggttgtcttggtttttgaagacggtatcaagcgtcttgcacgtgtgactgaccgtgagaaccatgtctttgaagtgattgaaaacttaaatgataatgttgagatgcctgtatctgtaaccattgcctctggctttcccaagggagataagctggatctggtgacacaaaaggcaacagagcttggagctcaggctatctgggccttccctgccgactggtctgtggtcaagtgggatggtaagaagcttgccaagaaggaagataaacttgccaagattgctctaggagctgcagaacaatccaagcgtaatcgtgttccagaagttagattgttcgagaagaagggggaatttctatcagaattagataattttgataagatttttatcgcctatgaggaaacagccaaagcaggcgagttggctactctagctcgtgagttggctaaggtagagagtggtcagaaaattctctttatctttggaccagaaggtggtatttctccgtctgagattgatgcatttgaagaagctggtggccttaaaattggccttggaccgcgtattatgcggacggaaacggctcctctctacgctttgagtagtgtgagttatgccctagaattgaataaataagagaaagttggccttgttccaactttttttgtatttgacacttttaagctaagattgcatcttgccattggttttgtatgataaatcgagtaattctaaaaaagttgataatcttatttagttttaatataattgtattatctttataaaaggggaagatttttaatgaaaacgaatcgttatgtgactcaatccgctgtggttttgggcctttttgctctcttgactgtgccacaagtcgtagggcaagctgatgaagcaacggcacctgtaccaactgcttctaccgaaactgtggcagatagtggtgcatcagtagtatcaggacaaggaacttctgggacagctgttcaaggaggaacagagactgtctctgctacaccaacaacagtagcgacaaatgcgtctacagagccatcagctaatacctcaacgaaccaagcaagtcaagaagccagtgctgttttgaccaatgctaaccaggtgacaccagcagtaccagtacaggctgaaccggttacagagcctgctcatgaggggcagaccgttgatatgcagattttgtcaacaacagaccttcataccaacttggttaactatgactattatcaagataagccgtctcaaacagttggtttgtctaaaactgctgtccttatcaaaaaagctcgtgaaactaatcccaatacggtcttagtggacagtggggatacgattcagggaactccttttgggacttataaggctttgattgatcctgttgcccaaggtgagactcaccctatgtacaaggcttttgagatgcttgggtatgacgccgaaacgcttggaaaccacgagtttaactatggtctagaatttttggatcgtatggttaaggctgctaagattaacattattaatgccaatgtgcgtaatgctcagactggtgattactattacaacccttataagattgttaacaagacctttactgatacggacggcaaacaggtaacactaaaaatcggtattactggtgtccttccaacacagattttggtttgggataaggccaaccttgaaggtaaggtaactgttgatgatccaatggaggctgttaaggctatcgttcctaagatgaaggctgcaggagctgactttatccttgttgctgctcactctggtattggtgacaatgaatacactaagaatgaggaaaatgaaggttaccaaattgctggtatcgaaggcgttgatgctgttgcgacagggcattctcacgctgatttcccaaatggagatggcacaagtttttatgcaaaataccctggtgtagatgatgtcaatggtctcatcaatgggaagcccgtggttatggctggtaaattcggagatcatctaggtatcatggatgtcaaattgacttacacggacggcaaatggaaagttgtcaatagtaaggctaagcttgaaaagattgatactaagtcagatgttgcggacaaggacttaattgacatggcagctcatgaccataatggaacaatcaactatgtacgtaaggaagttggtgagactactgcaccaattactagctactttgctcaggttcaggatgatccatctattcaaatcgttaataatgcacaactatggtatgctaaaaaacaagtagcgggaacagcagatgagaatcttccactcctctcagctgcagcacctttcaaggcagggactcgtggggatgcgacctactataccgatatcccagctggcccattggccattaagaacgtcgcagacctctacctctacgacaatgttactgccctactcaaagtgactggggcacaaattaaagaatggttggaaatgtctgcaggacagttcaatcaaattgatcctaacagcaaagaaccacagcaactcattaacagtagctatcgctcatacaattatgatgtgattgatgggttgacttataagtttgatttgacacaacctaacaaatacgatcgcgaaggtaagttggttaacccagacgctagccgtgttcgtgacttggcttatcaaggtaaacctattgatttgaatcagactttccttgtcgtgactaacaactatcgtgcgactggtaacttccctggtgttaaagatgctgcagaaaaacgtctcctcaatcttgagaatcgtcaggccatcattgactatattgtcagcgagaaaacgattaatccgagtgccgatggaaattggagtttcgtccctaatatcacgaatgcagatatccgttttgcctcatctgacaatgcgcgtgcccaccttgctggtcaggatgccattagttatgtaggaccatcaacacaagcaggatttgcagagtatcgtttggttgttaaggaaaaggtaaatcaagttgaggatacaactaataaagaatctgagaagtcaccaaaaggttctgagacagcagaccaaactaagcgtgagacaccaaaagctactgtaggtgctagcgtggctaaacctgctccaactatccagttgtcaaacgctcaagttgttatcttgcctcaagcccaagtacaagaaactcaaggttcaagttcagataagaccttgccaaacactggttcagatgaatctgtatcagcaactttagctggtctggttcttatgaccttggctggattctttggaatcaaaaaacacgaaaaaaattaagcaaaggaaaaagcccctatcagggcttttttgctctagctttagcgttggttaaagttcttttgggcttctaggataataggtgctagacgttcgatatcagactgtgtgccgcgtagctcgaagtcacccaacattgggaaaccaaaacgttgactgtactgtttggcggttaggcagtactggttattgaagttacggttaccagagccgataataccaaagcaacgtttgtgattatcatgggctgcgataaagtctcccagtggattggttaggatttcaacatctccattgtcaacaccatttcctccttcaaggtaggttggcaagagtgcgacaaagggttcatctacttggaaggtttcatgattaagctctttaatattgatttggcgacattcaatcccgtggttgagggacagatagtcagacatacgtttgacaaagctttgggtattaccgcttagactaatataaacgagggtaagttgagacataagcgtcctctttctatctatatcttgtgtttgttcaatcattctaacacaagatattgtgcttttcaagttagctccttgcgcttaagaattgcctatctagctctttttctttacttgtaaaagtgataaaataaaggttattaagagaagcgaaggaagaaatcatggctaaagataaaaatgtaacaggagaagaaattttagacatttgctcggcctacatgtcagcagatgatttgaaattagttgaaaaagcctggcattatgcgacagatgctcatagtgggcaatctcgtcagtcaggagaaccttatattattcaccctattcaagtagcaggtatcttggcagatctccatcttgatgcagtgacagtagcctgtggtttcttacacgatgtcgttgaagacaccgaaaaaacgcttgatgatttggaagcggattttggtacagatgtacgaaatatcgtggacggtgttactaagcttggtaaggttgagtacaagtcccacgaggagcagttggctgaaaatcaccgtaagatgcttatggccatgtccaaggatatccgtgtcatcttggttaaattggcagaccgtttgcacaatatgcgtacacttaagcatcttcgcaaggataagcaagagcgcatttctcgcgaaactatggaaatctatgctcctttggcccaccgtctgggtattagtcgtatcaaatgggaattggaagacatgtccttccgttaccttaatgaggtggaattctacaagatttctcacatgatgaaggaaaaacgtcgtgagcgtgaggaacttgtggacgagattgtcgataaaattaagacctatacagctgaacaaggacttgttggtgatgtgtatggtcgtccaaaacatatctactctatttatcgtaagatgcgcgacaagaaaaagcgctttgatcaaatctatgatttgattgctatccgttgtgttatggagacgcatagtgatgtttatgccatgttgggatacatccatgagctctggcgtccgatgcctggccgttttaaagactatattgccaatcctaaatccaatggttaccagtctatccatacaacggtttatgggccaaaaggacctattgaaatccaaatccgtaccaaggaaatgcaccaagttgccgaatacggggttgcagctcactgggcttacaagaaaggtatcaagggcaaggtagattcgaaagagtctgctttgggaatgaactggattaaagatcttgttgaacttcaagacgcctcaaatggtgatgctatggggtttgttgactctgttaaagaggatatcttctcagagcgtatttatgtctttacgccaaatggtgctgttcaggaattgcctaaagattcaggacctattgactttgcctatgccatccatactcaagtcggtgagaaggccacaggtgctaaggttaatggccgtatggtgcccttgactgccaaactcaagacaggtgatgtggttgagattgttaccaatgccaattcctttggccctagccgtgactggattaagatggttaagaccaccaaggccagaaataaaattcgtcaattctttaaaaatcaggacaaggaagcctctatcaccaagggtcgtgagcttttgattgcctacttccaagagcatggctatgttgccaataagtacctagacaagaaacatattgaggaaattctccctcgtatgagtgtgcgtagtgaagaagctctctatgccgctgttggttttggtgaaattagtgctgctgctgttttcaaccgtttgacggaaaaagaacgccgtgaagaagagcgtgcgaaggcaaaagctgaagctgaagagctaatgaacggtggcgaagttaagactgagaagaaagaagttcttaaggttaagagtgaaaatggcgtcatcattcaaggtgcttcaggtctcctcatgcgtatcgctaagtgctgtaacccagtacctggagatgagattgaaggttatatcaccaagggccgtgggattgcaattcaccgttccgattgtaataatatcaagagtcaagaaggttatgagcaacgtttaatcgaagtggagtgggatgaacgtaatgccaataaatcttatttggcagagattgacatctatggccttaaccgttctggtctgttgaatgatgttcttcaaatcttgtcaaatacgaccaagagcattgctacggtcaatgcgcaaccaactaaggacatgaagtttgccaatattcacgttagctttgaaattgcaaaccttattgaattgactggtcttgtggataagattaaaattattcctgatgtttacagtgttaaacgtacgaatgggtaaggagtttctgcgatgaagattgtaattcagcgtgttcaaagtgcctctgtggttattgaggattgtacggttggcgctattaagcaggggctcttactcttggtcggagttggtcccgaggacaccaaagaggacctagagtatgcagttcgtaagattgtcaatatgcgcattttttcagatgaagatggcaagatgaatctttctgttaaggatgttagtggccagattttgtcgatttctcagtttacgctttttgcagatacgaaaaaagggaatcgaccagcatttacgggtgctgcaaagcccgacatggctagccagctctatgacgatttcaaccaatccttgtcaactcatgttcctgtagaaagaggccgctttggtgcagatatgcaggttagtctggtcaatgacggacctgtgaccattattttagatactaaaaatcgataaataaaccatttctcgccttgtgtgagaggtggttttttattctcatcgcaggaattatttaggtgatggattttcattatttgggatttatttttgtcattttaagtagactgaatcaagtgaatatttaatgaaattagaaaatgttgttctcaaatttctgaaaaaacctgaccattcatgatgaaaaaattaccgtttacgaggattaccggaaattcccttgtcttacaaaaaagattaagttaacattagtttcataagaaacaccaagcgatttttatgaaactaaaaataactcgagtttacagcatgcaaatacaaatagtgataatttgaaacgccgaggtgatttaaacttttttagagggatagagagatatgtcaaagaaagtagcgtcaactaaattattatcaggtttgtttgtcgccggtggtgtcctagggattaatcaggtcgccaaggcagataatgtggtcagttcagaagcaacaaaaccagttattacaactgaagcagataacttggtggtggtaccaactgaggccgttgctccagtagcgacaacagaagtaggtccatcatctgctgctgttgcgacagatactgcaacaacagcgacagcttctacaatcttttcacaagctgtgccagcagagagtgctagctcagaaacgcttgtagccagtgaagcactagctcctgagtcagctgctgtggaaaccatcacatcatcatctgataatgctactgaagcaggacgccattcaactgctcaagtaacaccagttacagaagtgacagagcaaaacttgaatggtgatgcctacttgacagatccagaaacaacaaaagcagcttatagcaagacagatggtgatattaattattccgttgttgtgtctaatccaacagcagaaactaagacgatgactgtcaacttgacacttcaacatgcttcagaaattatcggtcaagataacgttgaccttacgctagcggcaggagcttcagccaaggtttcaaacttgacagtagcgtcagagtggttgacaaacaatacaggttacttggtgacaatcagtgtcaacgataaatctggtagtactttgtcaagcaagcgtgctggcttgtctgttgaagatgattggacagtcttcccacgttacggtatcgtagcaggttcgccaactgatcaaaacagtattcttgttaaaaatcttgaagcctaccgtaaagaacttgagctcatgaagtctatgaatatcaactcatatttcttctatgatgcttataatgaagctacagatcctttcccagagggtgtcgatagctttgttcaaaaatggaatacctggagtcacactcaggttgacactaaggctgttaaagaattggttgatcaagttcataagtcaggtgctgttgccatgctttataacatgatttcagcagattcaaatccaaagaatccagcccttccacttgctgctttggcttataacttctacgatagctttggtaagaagggtgaaccgatgacttacactatcggtggtaccccaactcaagtttactatgatccagcgaatccagattggcaaaaatatatcgcaggtgtcatgaaatcagctatggatcgtatgggattcgatggttggcaaggtgatacaattggtgacaaccgtgtgactgattatgagcaccgtaacagcacagacgaggctgactcacacatgatgtctgattcatatgcgtcatttattaatgctatgaaagacctcatcggtgaaaagtactacatcacaatcaatgatgttaatggtggtaatgacgataaactagccaaggcacgtcaagatgttgtttataatgagctttggacaaacggtggttcagttattccaggacgtatgcaggttgcctatggtgatttgaaagcacgtatcgatatggtacgcaataaaactggtaaatcacttatcgttggtgcctacatggaagaaccaggtattgactatactgttcctggcggaaaagcaactaacggtgcgggtaaagatgcccttgctggtaaaccattgcaagctgatgcgactcttctcgtagatgcgacagtagctgcagccggtggttatcacatgtccattgcagcccttgccaatgctaatgcagcccttaacgttcttcaaagtgcctattacccaactcaatacctcagtgtggctaaggacactattcgtaagctttacaattaccaacagttcatcactgcttatgaaaatcttctccgtggtgagggtgtgactaacagcactcagtctgtatctaccaagaatgcttctggtgaaatcctttctaaagatgctcttggtgtgacaggaaatcaagtttggacatttgctaaatcaggaaaaggtttctcaactgttcaaatgattaacatgatgggcatcaatgcgggctggcataatgaagagggttatgcggacaataaaacaccggacgcacaagaaaatctcacagttcgtcttagtctagcaggtaaaacagctcaagaagcagctaaaattgctgatcaagtctatgtgacatcaccagatgattgggcaacttcaagcatgaagaaggcacaagcaagccttgaaacagatgaaaatggtcaaccagtgcttgtcatttcagttcctaaactaactctttggaacatgctctatatcaaggaagacacaacagcaacaccggtagaaccagttatcttgaaaccagttactaaccaagctggtaagaaagtagataatacagtaacatctgaagcaagctcagaaacagctaaatcagaaaatacaacagtaaataaaggttcagaggctccaactgatacgaaaccatctgttgaagctcctaaactagatgaaacaactaaaccagcaccatcagttgacgagttagtaaactcagcagctgttccagtggcgatagctgtgtcagagaccgcacatgataagaaagatgacaactcagtatctaatacggatcaaggtacagtagcatcagattcaatcactacaccagcttcagaggctgcaagcacagctgcctcaacagtctcatcagaagtatcagaaagtgtaacagtatcatcggaagcatcagaaactgaaaatagttcagtagcatcaacttcagagtcagcaatttcaacgacgacagcaatttcagaatcacatacagtagttgaaccagtggcttctttgacagaatcagagagtcaggcaagcactagccttgtttcagaaactactagcacaattgtctcagttgctccgtcagaagtatcagaaagcacaacagtatcatcgaaggtctcagaaactgatattatctcagcagcatcaacttcagagacttcagcatctgaatcagagaattcaatcagcacagtcgtttcagaatcagaagtagttgaagaaccagctgtttcattgacagaatcagaaagtcaagtgagcacttcagaagtgacttcggcgatttcagaaacagtaagcacatcagaggaagtcatccttgatggactatcagaaaacatcaatagttggaatagactctctgtagctcctcgcgtctcagaaaccttaccaagtacttctgaaacgattacagaagcagcatcactctttagcaactatgcaagatattcagaaacagcaagctcagaatctcactctatggtagcagcttcttcagaagtttctattgaaaaattagcagtatctatcttgaaagatactgagggtggcttgtacgatgctacaacaatcagaaatattgttgagatgattgatagcattacaacaaatgtcagctatactcgcagtagccgtcaagaccttgtcaatacagcttcgtcagataatacttacaatggtagtcaagatcttaaccttgcaagtaagacaacgacgcaagcaggtgaaaaaggaacaactgaagatcttaaggctacaattgctaaaacagcaaaatctcacaagtggggagaacatgctgtagctatccttacagctattgtccttgcaggtgcggcaacccttgcagctcttcgtaacttcttgatgtcaaaaaaagttgataaataataagtagaactctttgtgtaaacaaggagttttctttatactggctgctattttttctgaaaattgtgatacaatagaaatagtttgaatattgtgtcaaaggagagccaatgattactgcaaatgatatcgtaaaggctaatgaagtcttaaaaaacgtggtggaacgcacaccactagattttgatcgctacctatctgaaaaatacggggcgaccatttatattaaaaaagaaaatatgcaaaaggtacgctctttcaaattgcgtggagcctactatgctatccatcaattgagtgatgaggataaggcgcgtggtgtggtttgtgcatcagccggaaaccatgctcagggggttgcctacacttgtaacgagatgaagattccggcaaccatctttatgccagtaacaacacctctccaaaaaattggtcaagtccgtttctttggtggcaagtttgtaacaatcaaattggtgggagatacctttgatgcttctgcccaagcagcgcaggaatataccaagtctgaagggatgactttcattgatccattcgacgattataatgtccaagcggggcaaggaactgttgcttatgaaatttatgagcaggctcaagaggaaggtgtttccttcgatagtatcttggttccagtaggtggtggcggccttatctctggtgtagctacctatatcaaggatgtagcaccgtctatggaggttattggtgttgaggctagtggtgctcgtagtatgcgtgctgcctttgaccgtggttatcctgtaaaactcgaagaaattgataagtttgcggacgggattgctgttcaaaaggtaggtgtcaagacctatgaagtcgcacgtaaatatgttgaccgcctcttgggagttgatgaaggattgatttcagaaaccctaattgatatgtactctaaggttggtaccattgcagaacccgcaggtgcggcatcagtggcagctttggaagtgatcaaagatgagattaaaggaaaaaccatcgtctgcatcatttcaggtggtaacaatgacatcaaccgtatgccagagatggaagaacgtgcgcttatctacgatggtatcaagcattactttgtggttaacttcccacaacgtcctggtgcccttcgtgaatttgtaaatgatatcttgggaccaaatgatgatatcactcgttttgagtacatcaaacgtgctaataaaggaaaaggtccggttctcattggtatagctcttagtgataagaacgactatgatggacttctcgagcgtctttcggcctttgacccaagttatatcaaccttcacggtaacgaaacactatacaatatgcttgtctgaggacaggttcagacaatgaaaaaagaatcgacgaagtcggttcttttctactttgacttagctataaagtggtactaatgccttatcttcaaactaaaaccccagtatttctactgaggttttctttattcgataattaagagtccatctttaatagcgaatggattgtctttattgatgtggtcgtagaacatgataccgttagtatggtcgatttcatgttgaacaacgattgagttgtaaccacggagtttaacacgttgcttttcgccctctttgttgaagtattcaacagttacacgagcatgacgaaccacgtaaccaggaacgtcgcggtcaactgagaggcatccttcgccatcgcccaaagcagcatcctgaacagaatgggcaactactttagggttgtacatgatttcttgaaggctatatgcttcttttggtggattaccttcagcgtcttcagggtttggaacgagaacagcgataatgcgttttgaaatatctaattgaggggctgcaagaccgactcccccacgaagccccattttttcggcaataacaggatcttgtgagttacgaagaaactgcatcattttttcgcctaggataatgtcttcgtctgatagtgggaaggttacatcttcagcgacagcacgcaaggttggatttccttcgcgaatgatatcattcatatcaatcatatggctggcgcggataattttggtttgagcgtccatttgtttacctctattttctttgatttacttgtttataactatagcacaaaagggttgaaaattaaaccatcaaggattaaagtgaggctttttctaatcgataaaagccagtttttccaaggtttgtctctctaaaatacgataggttttaaaggcctctttttcgataattccctggtcgataaattgtttgatgactcgctgtacatgacgatagctagttccaaaacgggaagctaaaatagatggcgataattgaaagatattctcttcttcactattcaaaatatgggtggccagacgctctttgacagagtagctcgcattcgttgaggcagtgataccttgcttatgtagtgccatagccaggttacgtccaatttggtagagaaaaacagggtctttgaggagttcttctttattatttaatgggagctgtactgcttgaacctcttctaaagcaatgactgatgatcctgctggttggttggtcatgagttctacatctcccaatatctgaggctgattgagcgtttctaggatatgttctttaccattgaagagagaacgaacaatttttacctttcctgataaaatgtaggtcagctcagtgatagcttgcccttgggtacaaatataatcgtttttttgaaaggtgactttttgtaattggttgaggtaggggggtggaaagacctggtcaagttgaggtcttatggtatgattacgcatacatctccttttttaggacctaggtcctattttttaaagtctccttagattataatgaaaaaataactattagacaagtaaggaaaggatgttctaatccctatattatgacacgaattttagaaaaaatgagcctgcttgggctatccttgctcttgatttcggccttttcgatttcaacagcgttaccatctatgttggactactatagcccaaccttttctgccgcgcaagtggagcttttagtatctgtcccttcattttccgtagtcgcgatgctcttacttaattcatttattgacaaatggctaagtgatagacagctaattgtgactggattgctcttacttagtagtgctgggatttttcctttttttgtacaagcctatcctcttgtcttactgtcacgtattgcttttggaatggggattggtcttatcaatgctaaggcgattgccatcatcagtcaacgttatcaaggtaaagagcgggttcagatgctaggtattcgtggctccatggagttgattggtggagcttcttgttctcttttagttggacaattactgaaaattcattggacctttgcctttcttatctatggttttggttttgtgattttgattatgtacctcctttttgtgccatcgatggagcaggtggagaagaagcagattacaaaaagaaaacaagttctgaacaaaaaagaccttggtatgattcttggcatggctcttttagcaggttttgtcatctgtatcaattcttcgattagtttgcgcgtgcctctgtttcaagttgctagtaagactattgagagtggtcaatcagccttagtactgagtttagagcagggaattggaattgtagctggactgagcttcgcctcgcttataggacattttaaaaatcgtcttttgcttatagtgatgttcttgttagcggtttgtctctttgggatgtcagtggctagtaacttaccgattttgattttatcttcagttggtgttggtttcttttatagtattattttgacaattatctttaaccgactttctgagtctattgctagaaatctgttgaacaaggcgacagcctatgtcctcttagggtgtaacctagggtcagccatttccccttatgttttgaaattattggcactcatatctccaagttttagttggatttttctagcttatgctatcgtaagtttcctacttttccttggattctttctgaatgcaaaaatggccaaaaaagtctaagcttcaaaaacttaatcagtgaaatcttgcgattgacaaagattagtagatgagctaaaatagagaggtcgtaaagacaaaccaactctttcttggttttaggagagccaatcctaagactcggatggagcaaaaaaaggagaaaaaacatggcaatctcaaaagagaaaaaaaatgaaatcattgctcaatacgcacgtcacgaaggtgacactggttcagtagaggttcaagttgctgtccttacttgggaaatcaaccaccttaacgaacacattaaacaacacaaaaaagaccacgctacttaccgtggtttgatgaaaaaaatcggtcaccgtcgtaacttgttggcataccttcgccgcacagacgttaaccgttaccgtgagttgatcagctcactcggacttcgtcgttaattcaagatacaagtgcttaggccttgttcaattgaatacacgaaaatggaactgctctatgatggggcagtttttttattcactaggattttagcccgagttcaaaacagctctctagatgtagagggctgtttttctgtgttcctttaaaaaattctgacgatgattaatctatagaacaaaaaaactcccaaattaattctggaagttttttaacttaaaatttttttgataactgtttgaaattgagggagttgatggatagcagttccgataaggatacctaacatatttaaggtgatatctcccaaatcaaagactcccaaatgtccgaagtactgaatggattcgacggagaaaagggtaaggagacaaagtaggagattactcaatcgtgaagaaaagaggagtcccagaggaatgaacattaacaggttcatgatgggaacgaagtggctaccccagtataattcccgagcgaaggaaagggggttaagtgataggccttgggtaccaatgtttttcaagaaaagtaggtagaagagagcaagaaagtaaatgaagtagagtaggagtagtgtctgttttttcagctttctagtaagaaggagtttcaaaaaagcgtagacaaagtaactcagtaggacaataatgactaggttgagtaagacttgaaagtaggagccataatgggcgatgtaatgaacgtactgttcgagatgccccctataaaaccaataagacaaggccagtgagaggattcctagtaagatgttactcaatgtttttaatgtttttgccactttgctcctccatttgcatatgatgagtacacattatatcaaaaaaacgtttaaagaaagttaagaaactgtaacgaagttttgatagaataaaaggataaggcagaatcaaagactaaaaaaggactttgaaacagcaactctacttttgactaacaatttaatgatttttgtaaacaggctatgaaagcttataaaataattaaattttaaaaattaggagtcagcatcttgtttcaggattattaaaatgttattatatagtagtgaatttttaacataaaaaggagttcgtcttatgaataaaaaggttttggcgacagctggaattgcagcacttgcagtttctgctacagttgctaaagctgatgaggtaacgacaaacgatcaagcctcaacaacagcatcagtatcatcgacagctacacaagctgtcccaactcaagctcaagtcgaagcggctagagaagaagccagcgctgcaaatcaagcagtatcgcaacaagagtcagttgttgctaatcatgaagcagctgccaaccaggctcaagcaaacctagcgacagcagatgctaacttgcaaaaggcacaaacagcagccgatgaagcaagtccagaaactattgctgccgctcaaggtcaagtaactactgctgaaaatgcagctaaggaagctaagtcagcagtcgaaacagctcaatctgcagaaaaaactgccaaagatgcagcagacaaacagcaagctgtcgttaatacagatcaagctaatgtcaatgcaaaagctactgaagtggctaatgctcaaaaatcagtagatgccgctaaagcagcccttaatggttctagcgcttctgaggcagcttcgaatcaagctaaagcacaatcagcttttgatgctgcaacagcagctgagaaaaaagctcaagaagaattagcagccgctcaggcagctgataaagaaaaagctactgctatttcagctaaagaagggcaattgactgcagatcaaaatgcagcaaaccaagctaaagcagcttatgagactgctcaaacagtagctaatgaaaaggcagctgctcttgcagccgctgaagcagctaagaaaaaagcagaatcttcaacaagttcaacagctaatgttcgtcaaaaattctcagtgtcacaagagtatgtcaatgctcttaagattcatgagtctaaaacagcgaccgcagcagaaaaagctcaagctgaacaagtcttgaagaacgttaataaacgtgatcgtggtaacaatagttatcaagataatgaagcggataaaaatgttaaaattagtgatttgaataatcttagtgaagctcaaattacagatttgtcattgtatgcttcaagtttgattaaccaaattcgtacagcctttggtacaactcaaacatctgtttcaaaaggtagtgttcttgcggctgaccgtgtttcagatggttatgtagcagataactggggttgggaagctattacccatcaacgacatgatagtgccgcccttgaccgtgctggtaagtcatttaatagtgtaagtattggtgaaaaccttaatacatggcaaggtttgacaggaccatttacccttaacgacattaagaaatatgtctatgaagctatgcttgacttcatgtttaacggtaatgagtggaaccatgctcgttctatctctggacttacagcagatggtggtgagtcttacattggaacagacatcagtgttgttgccggtgcctttaacgttcacgtaaacaatgtcaataaaaattctatcgcttctgatagtagctttgacacaactaagattgctaacccatatgaaggtaaccaatctcaatcatcttcaaatgcaaatcttgctgctgcaaaagcagcttatgaagctgctaagcaagctaacgatcaagctcaaagtgacttggctagcaagaaagcggcttctgagtcagcaactcttaagcttaagaatactcagtcagaacttgcagctcttaaagcgactgcaagcaagttggcagctgctcagaataacctttctgaaaaacaagcagcccttgcaactgctaaatcagaattggaaaaagctaacgctgcagttgaaaaccttaatgctaacgcacaagaaaaagcagcagcccttagcaaagctcaagcaactcttgatgaaaaacaagcagagcttaaaacagctaaagataaacttgcgacaagttctgcaaccttgcaacgtttgacaaatgcctacaacgctgctaagcaagatactgctaagaaacaagtagcattgacacaagctaaccaagccttgactgctgctaagaaccgtctagcagcccttacaaatgcttcaggtaacctagctaaggctaaagcagaacgtgcaacagcctttgccaaatttactgcggcgaaagcagctctttcaactgaacgtgcgaaacttgttgaattgtcagctaagcgtgataaattaacgagcgaatacacgactgttcaaacagccttcgataactacatgaaagctaaggcagacaaagagcgtcaaacacaattggctaaagagttcgctaacattacatccaaaggtcttacaccagtacctgtttacgatgtagatggtaaagttattgctttcacaacacaagaacaagcagctcaaactgtagctcaagttcctgtaaattatggtcaaacaaaagctgagaaacaagctcctgtacaagcagcagacagcttgccagaaacaggtgagtcaactgcagcaggattcagtcttgtaggtctcttcatgacactattggccttccttggtttcgttgacagacgtacacgtcgtaactaatcattatagacaaaaaaacggcaactgccgtttttttgtatgtctgagaatctaaaaaagttaaggtcgaaaccttaactttttcgtttttaacccaagaaacgtttgaggaattccttagtacgttcttctttaggattttcaaagatttgttctgggctaccttgttcagcgattacccctttatccatgaagatgacacggtctgaaacatcacgtgcgaactccatttcatgggtaacgataatcatggtcaaaccagtttcagatagctcctgcatagtcttgagtacttcccctaccatttctgggtcaagggctgaagttggctcgtcaaagaggatggcttctggatcaacagagagggcacgggcaatggccacacgttgtttttgtccccctgaaagttgtttgggtttagctttccagtattgttcccccataccaactttctccaagttagctttggcgatgctttcagcttctttacggtcacgtttgagaacagttgtttgagctacgatagcattttccaagacattaaggttttcaaagaggttgaaggattggaaaaccataccgagtctttcacgataggtagtgaggtcgtaacctttttcaaggacgttgtccccatgatagaggatttcaccacctgaaggtgattctagtaggttaatagagcgaaggaaggttgatttccctgaacctgaagaaccaataattgagataacctcaccctttttgacactgagggagatatctttgaggacttcattttttccgtatgattttttgaggtttttaatttctaaaatcgtctcagtcattagtgaacccctccttgtgtgtaagtatcttgatccaaacggcgttctacataacgcaagatgcgtgtcactgtgaaggtaaggacaaagtagattgctgcgataacaaagaatgtttggaagtattgataagtttggcttgcgacagtgttaccagcgaagtaaagttccacaacagagataacgttcaaaacagaggtatccttgatattgataacgaactcattaccagtagctggcaagatgttacggataacctgtggaagaacaatcttacgcatggtttgaccatgggtaaatccaagagcagttgcagcttcaaattgtcctttatctacagcgaagataccgccacgaacgatttcactcatgtaggctccggtgttgatagaaacgatgaagacagctgctagagtacggtcaatattgataccaaaggcttgggcagtaccgtagtagataaccatagattgtacaatcattggtgtaccacggaaaacctcgatatagacattaagaacccaaccgaagagtttttggatcaaggctacaaatttattagcagccttaggagctgtgcggtaaacaccaatcataagaccgatgaaagtacctacaactgtaccgataattgagataagaagggtaattcctgtaccacgtaggaattgtggccagttcttagcgatgatagtgctcatctgactaaagaagtttccttttttagcctcatcagtcttatctgcaggttggatgttaatgatgtgatccatcagtttgacacgttcctcttggctgattccagcaaggaccttattgacttgctccatttgttggctgtctccttttcgaagaccgacggccaaggatacgtcatcgtctgaaacctggaaaccaccatctttaagcgtaatcatcttatattttgagctagcttcttcggcagtttttgcttcaggacgctctgaaacataaccatcgatgataccagatgcaagggcttggcgcatagcaccgaagtctcccatagcggtttgtttgctgacacctggtatttgatcaatcaaattatagagataaaccccttgttgagctgtgattttagcatccttgaagtctttgaggctcttagcgttggcataatcaccatctgagctgacaaccatgacaggttcgcttcggtagtagctgtctgaaaagtcaatttcttgacgacgttcagctgttgggctcatacctgcgataatcatatcaatcttgccggaagtgagggcaggaatcaaacctgtccaagctgttttaaccaccaagggtttcttgccttgggcttcagcgatttttttagcgatttgcacgtcataaccgttggcatactgtttagtaccttcgattggaacggctccgtttgagtcatcgtcctgcgtccagttgaaaggtgcataggcagcttccataccgacacggagatactcgtctgcttgagcgcttgatactccgccaaaaacgaggaggagcgctgcaaagcaggctacaataatttttttcattgaaacaatgtctcctataaaaatgtcataccttactattttacaggaaattaggattaatgacaataagttgggattagaaaaacaatctctataccaagattgtcttcaaatacaagttgtaatttgatataatgggaaggacgatttggagccttgatcatttttgctgtgatgaggctagcattttaaaacggagataattatgcaaacggcacaatttattattgaattactaaaagcagtctttcttgggattgtcgaaggtatcactgagtggctaccgatttcatctacaggtcacttgattttggtgaatgaattcttgaacttgagacaaagtaaagatttcatcgatatgtttaatatcgttatccaacttggtgctattcttgcggttatggtcatttactttaaacgtttgaatcccttccaacctggtaagacagcacgtgaagtgcaattgacttggcagctttggctcaaggtggtcattgcctgtattccttcagccttctttggtcttcttttagatgactggatggaggcccatctcagtaatttctttgtagtagctatcatgttggtggtctacgggattgcctttatttggattgaggaccgcaatcgacgtgtagagcctaaggtaacggatttggcacgtatgtcttacaagacggctttctatattggtcttttccaagtcttgagtattattccagggacaagccgttcaggtgctactattcttgggggtatcatcgttggtactagtcgtagcgtagctgctgactttaccttcttccttggtattccaaccatgtttggttatagtggacttaaggcggttaagtatttcattgacgggaataccttgacaggtggacaagtggctattctcttggtagctagtgtgacagcctttgttgtcagcttgttcgtgattcgcttcttgatgaattacattaagaaacatgatttcacagttttcggaaaataccgtatcgtgcttggtattattgtgcttctttatggagctgtcaaacttattttcggataattacgttcaagtaaactgaaaaaggacttcaattgaagtccttttttatctggtttagagattatttgtggagaagttttccaaagataaggtaagctagcaaccataggaccagtccgcaagtcaagaagctagctaggattttcaagaagtccacgatattatgcaagggataccatccggacaaacagagaattggaaggatggtaacacacatgattgagaagtggagaagagattgctgtttgagcgataaacgattatcgtcgtaaatgggtgcagttgctagtatgatggcgacgattagccctgtaagaaaggtagatttgtttacttgataaggttgccccgataagtagagaaagagcgtcaataaactcgttattcctccagcaatgctagctcgtagccacccttttttataggcagtcatggtcatcacctccatgtatatcttcacttttattatactccaatctaggatagatgacaggtataaatggggaaatacaaggttttgttagtattaagaagtttttagaaatcctttccaaaataagactcaaacttgctcagaaattgctatctcttggcttttctagtataatgaaataactactcgtgcgaggttttttacatatggaaatgaaacaaataagcgagacaactctaaaaatcatgattaccatggaagatcttgaagaacatggtatggaattgaaggatttcttgattccccaggaaaaaacagaggaatttttctatactgtcatggatgagttggacttgcctgataactttaaaaatagtgggatgctgagcttccgtgtcacgccacgcaaggatcgtgtggatgtctttgtgactaaatcagatcttaaggaagaccttgatttcaacgatttgtcagatatggatgactactcagggctttctccagaagagttcctcaaggctcttgagggtaactttatggacaagggtgacatcgaagcacaccataagctcgaagagcttgaaaagaccttggaagaggttgataaggctatgacagagcctaccaaggaagtggctgaagaaaatattcgtgaagactatacccactatgtcttggccttctctgactttgatcaagtggtgacttttacgcaaggtttgaaggatgtgcctgttgaaggttctgagctttataaacttggggatgtctactatatgacagtccttctttacttggctgatgagcctgattattacgcgaacaatatgtatgcgcgttttcttgaatatgcgaatgtggcagaccgaacacgtgcctacctacaagagcatgcaacaatcttgatggaagaggacgccttaccggtactacaagcaacgaaatggagctaagacatgccttggaccattaattatatattcgttttgattgggacctttttgatagccatcgtgacgacccctttggtacgctctttggccttacgtgtcggagctgttgacaatcccaatgcaagacgtatcaataaaaagccaatgcctagtgctggtggtctagctattttgttggcctttgtactagcgaccttggtctttatgcctatgattatccataaggatatttggcatgtttcctacatcaggtatatcttaccggttgttgtgggtggatctgtcgtagctctgacgggcttcattgatgatatcttggaattaaagcctctacctaagatgcttggtattgttattggagctgttatcgtttgggcttttacagacttccgatttgatagctttaagattccatttggtggtcccatgattcattttgggccagtattgaccttgattttaacggtgttatggattgcggccatcaccaatgccattaatctgattgatggattggacggcttggttggaggagtttctatcatttcccttatgactatgggggtgatttcttatttcttcctctatgatactgatattttcttgaccatgaccatctttgtcttggtcgctgccattatgggcttcttcccctacaattatcatccagcaattatctatctaggtgatacgggggcgctctttattggctttatgattggtgtcttgtcattgcaaggattgaaaaatgcaactgcagtggctattttgtcacctgttattatccttggagtgcctattgttgacacagtggtagccattgtccgccggaaattgtcagggcgtccagccatggaggctgacaagatgcacttgcatcatcgccttctagccatgggcttcactcatcgaggggcggttctggtggtttatgccatcgctatcctcttttcattgattgccctcctgttaaacgtttccagccgtttcggtggtattctcctactcttgagtttgattttgggaatggaaattctgattgaagggcttgagatttggggcgttggtcgaacacctctcttcaacttcctgaaatttatcgggaatagtgattatcgccaagcaaccatgttaaaatggaagcaagggcgaaaaaattaaacatttgaaaagccaagtaatggcttttttgttataatgattctaattaaggaaaatggaagttctctttttattttccagaaaatagcaagactattttcaaaaaaataatgcaaattagcgagcaagtgctcgctgtatatatgaaaaaggagtatacaatgtctgtacttgaaatcaaaaatcttcatgtttctgttgaagataaagaaatcttgaagggtcttaatttgactcttaaaactggtgagattgctgctatcatgggtcctaacggaactggtaaatctaccctctcagctgctatcatgggtaacccaaactatgaaatcacagaaggggacatcctttttgatggtgaaagcatccttgacttggaagttgacgaacgtgcacgcctaggtcttttccttgctatgcaatatccagctgaaatcccagggatcacaaacgctgagttcatccgtgcggctatgaacgctggtaaagaagatgacgaaaagatttctgttcttgatttcatcactaaattggatgaaaagatggaattgcttggtatgcgtgaagaaatggctgagcgttaccttaatgaaggtttctcaggtggtgagaaaaaacgtaacgaaattcttcaattgcttatgttggaacctaagtttgctcttctcgatgagattgactcaggtcttgatatcgatgcccttaaagtggtttcaaaaggggttaacgctatgcgtggcgaaggcttcggtgctatgattatcactcactaccaacgtctcttgaactacatcactccagatgtcgtacatgtaatgatggaaggtaaagtggttctttcaggcggtcctgaattggctgctcgtcttgagcaagaaggttatgcgaaaatcgctgaagagctcggttacgagtaccacgaagaagcgtaagtctgttactcgaaataactagaaaaggagtaacctatgtcaaaagaatctattatcgctttttcacaagcaaaggcagagccactttggttgcaagaccttcgtcaagcagcctttgataagattgaaagtttggctcttccaaaaattgagcgtgttaaattccaccgttggaatctcggtgatggaacgattactgaaaatgaaccatcagcaaatgtgcctgattttacagcgcttggaaacaaccctaaattggtccaagtaggaacaaatactgtacttgaacaattgccagctgacttgattagtcaaggtgtggtcttcacagaccttacgactgctcttgaggaaatcccagaagtcgttgaagccttctttggtaaggctgtagcctatgacgaggacaaattggcagcttataactatgcctatttcaatagtgcagcagtcctttatgtaccagataatgttgaagttgacttgccagttgaaagctatttttaccaagatggaacttcaaatgttccatttaacaaacacgttttgatcgtggctggtaaaaacagtaaattgacttaccttgagcgctttgaaacgctaggtgaagcgactgaaaaagctagtgccaatatttcagttgaagtcattgctcaagacggtgcacaagtcaagtttgcggctattgaccgtttgggtgaaaacgtcacaacttatattagtcgtcgaggtcgtatcggtcgtgatgccagcattgactgggctcttgggatcatgaacgagggcaatgttattgctgactttgatagtgacttgattggcaatggaagtcatgccaaccttaaagttattggtctttcatcaggtcgtcaggttcaagggattgatactcgtgtgacgaactatggtaacaactctgtgggtcatatcctccaacacggtgttattttggaacgtggtactttgactttcaatggtattggtcacattgtcaaaggtgctaagggtgctgatgcacaacaagaaagccgtgtgcttatgctttctgacaaggcacgttcagacgccaacccaatcctcttgattgacgaaaatgaagttacagcaggacatgctgcttcaatcggtcaggtagatccagaggatatgtactacctcatgagtcgtggacttgaccaagacacagcagaacgtttggttattcgcggtttcttaggagcagttattactgaaatcccggttaaagaagtgcgcgatgaaatgatttctgtaactgatacaaaactaaacaaacgttaggaactatcgacgcagatagtctaacctatgatatatctagatagggagataagatgtcagctttagatgcctataagattcgacaagattttgccattttagatcaggtagttaatgatgaacctttggtatacttggataatgcagcaacgactcagaagcctcaagtagttttggacactctcatggcctactatcatgaggacaatgccaatgttcaccgtggtgtgcacactttggctgagcgtgcaacagctgcttacgaagctagtcgtgaaaagcttcgtcagtttatcaatgctaaatcaaccaaagaggtcctctttacacgtggaacgacaactggtcttaactgggttggtcgttttgcagagcaggttcttgagccaggagatgaggtggttatttcaattatggaacaccactcgaatatcattccttggcaggaagcttgtaagaagacgggggctaaacttgtttatgcctacttgaaagatggccaattggatatggaagatttggctaacaagattactgaaaagacaaaatttgtcagtctagctcaggtctctaacgttttaggctgcatcaatcctgtcaaagaaattgccaagcttgcccaccaagttggtgcctatatggtggtggatggtgcccaatcggcgccccacatggccattgatgttcaggatttggaatgtgatttcttcaccctttctggacataagatgttaggcccaacagggattggggttctttatggcaaggaagagattctcaaccagatgaatcctattgaattcggtggtgagatgattgattttgtttacgaacaggaagccacttggaaggaattgccttggaaatttgaggctggtacacctaacattgcgggggctattgctcttggtgctgctgtggactacctctctgctttaggtatggaaaatattcatgcttacgagcaagaattggtagactatgttttgcctaagcttcaggcgattgatggtctgacagtctacggtccagaagatcctactcagcatgcaggtgttattgcctttaatattgatgggcttcaccctcatgatgtggcgacagctcttgattatgaaggagtggcagtgcgtgcgggtcaccactgtgctcagcctttaattaatcatttaggaatctcatcagctgcccgagcaagcttctatatttacaataccaaagaggattgcgacaagcttgtagaggcaattcttgcgacgaaggagtttttcaatggcactctctagactagatagtttatatatggctgttgtggccgaccactctaagagccctcaccatcatggcgttttgcctgatgtggagcaacttcaactgaataatccgacttgtggagatgttatcaatctgtcagtcaaatttgatggtgacgtgattgaagacattgcctttgctggtgatgggtgtaccatttctacagcttcatcaagtatgatgacggatgcagttattggaaaaaccaaggccgaggctttggagctagcggagattttctctcttatgattcaaggagatcataaagatgaagataagctaggcgaagccaagctcttggcgggggtttctaaatttccacaacgtatcaaatgtgcaacactctcttggaatgccctcaaaaaagccatagagagaagcgagctttaggaagtcaaggagaagttagtctccttgcccaagcaaaaaggaaaacgaatcaaacctttaataaaggaaaatactatgactgaaacaaatgaaaaagtagaaccaaaacccattgatttgggagaatataaatatggtttccatgacgatgtgacaccagtcttttcaacaggaaaaggaatcagtgaggatgtggtccgtgccatgtctgctgaaaaaggggagcctgagtggatgcttgaattccgcttgaaatcattggaaacctttaacaaaatggccatgcaagagtggggaccagacctttctggtattaactttgatgacttgacatatttccaaaaagcatcagacaaacctgctcgtgactgggaagacgttcctgagaaaatcaaggaaacatttgaacgtattggtatcccagaagcagagcgtgcctatcttgctggagcctcagctcagtatgaatcagaagtggtttaccacaacatgaaagaagagtatgacaagttgggtattatctttacagatacggactcagctcttaaagagcatccagagctctttaagaagtacttctcaaaactggttccgccaacagacaataaatttgcggcccttaactcagccttctggtcaggtggtacctttatctatgtacctaaaggtgtcaaggtggatattccgcttcaaacctacttccgtatcaataacgaagcgactgcccagtttgaacgtacccttatcatcgttgatgaaggtgccagcgttcactatgttgaaggatgtacagcgccaacatacacaacggctagccttcatgcggccatcgttgaaatctttgcacttgatggtgcctacatgcgctactcaaccatccagaactggtcagatagcgtctacaacttggtaactaaacgtgctaccgctaagaaaaatgcgactgttgagtggattgatggtaaccttggtgccgaagttactatgaagtacccatctgtttaccttgatggagaaggtgcgcgtggtaccatgctttcaatcgccttcgccaatgcggggcaacaccaagatacaggggctaagatgattcacaatgcaccgcatacatcatcatctattgtctctaaatcaatcgctcgtaacggtggtaaggttgactaccgtggacaagtcactttcaacaaggattctaagaaatcggtatctcacatcgaatgcgacaccatcttgatggatgacttgtctaaatcagacactatcccatttaacgaaatccataactcacaagttgcccttgaacacgaagctaaagtttctaagatttctgaagagcaactctactacctcatgagccgtggactttcagaacaagaagcaacagagatgattgtcatgggatttgtggaaccatttaccaaagaacttccaatggaatatgccgttgagcttaaccgcttgattagttatgaaatggaaggatcagttggataaaaactctgataatttaaagggaccagatggtcctttttgttttgcatgaaaaatcaggaaatgagctctagataactgttaggaacagagtaattgcaaagtgtagaaagcgtttacaatctgtatttaaaaagatataatagatttgaatagcaagtaatggaggggactaatatgggagtttataacagtgactggctactcaatcaaattcgaggaacagctaatgtggtcagtaaggcttttaaatttgagactctggatattgatttaggtcaggtggaggacgagcaaggtcacactattgatggtaatgactatattgacgacttgttgatccatgaacagtatgatcaggcaactaccttcattcatagtcaactcaagcgtttgacgactaatgactataatctccttgtcagcgtctatattgagtatttggagaatttgccacctgtaataaggcaaaaacaccattttgatgatagaaaaatagcaagtttgagggaaaaactatccgaattttcatggtaatttggtagagagtgtggaagagaaacgccgagcgtttacgatttttccaccctcttttttgtgttataatagaatcactatggataaattaattaaaacaatttcagaatcaggttctttccgtgcttatgttcttgatagcacagaaactgttagaatcgcacaagaaaaacacaatactctatcatcatcgacagttgctttggggcgtacccttattgccaaccaaatattagctgctaaccaaaaaggtgaaagcaaaattacggttaaggttatcggaaacagctcttttggtcatatcatctctgtagccgataccaaaggacatgttaagggctacatccaaaatccaggtgtggacatcaagaaaacagcaactggtgaagtcttggtgggtccattcatgggacaagggcagtttgtttctatcatcgattatggaactggtaatccttacacgtcatcaacaccacttatttctggtgaaattggtgaagattttgcctactatttgacagaatctgagcaaacgccatctgctgttggtcttaatgtacttcttgacgaagaggacaaggtcaaggttgccggtggtttcatgcttcaggttttaccaggagctagcgaagaagaaatcgctcgttacgaaaaacgcatccaagagatgccagccatttcaacgcttttggagtctgatgaccatatcgaagctctcttgaatgccatttatggggatgaaccttttaaacgtttgtctgaagaggagcttagctttgagtgtgattgctcacgtgaacgttttgaaaatgccctcttgacgcttggtaaggctgaacttcaagccatgaaagacgaggatcatggggctgaaatcgtctgccaattctgccaaactaagtatgaattttcagaagctgacttggaggaactcatcaatgactaaacttaattcgtccttcatgattggaaacgtggagattcctcatcgtacagtattagctccgatggcaggtgttaccaactcggctttccgtaccattgccaaggaattcggtgctggtctcgtagttatggagatgatctctgaaaaaggtctcctctacaataatgagaaaacccttcatatgcttcatattgatgagaatgagcatccgatgtctatccagcttttcggtggtgatgctgagggcttgaagcgtgcagccgactttatccagaccaataccaaggctgatattgttgatatcaacatgggttgtccagtcaataaggtcgtcaaaaatgaagcgggtgccaagtggctcaaggatccagacaagatttaccacatcgtcaaggaagtaacatcagtacttgatattcctttgaccgttaagatgcgtacaggttggtcagacagtgatttagctgtggaaaatgctcttgcggctgagtctgcgggtgtttctgcccttgctatgcacggtcgtacgcgtgagcagatgtacacaggtcactgtgatcatgagactttggcccgtgttgctaaggctatcaccaagattccatttatcggaaatggtgacgttcgtagcgttcaagacgctaaactcatgattgaagaacttggtgtagatgctgttatggtgggtcgtgcagctatgaacaatccttacattttcacgcaaatcaaccacttctttgaaacgggagaggagttgccagagcttccatttgataagaaattggacatcgctgaagaccacctcaaacgtttggtagaccttaaaggtgaaaagattgctgtccgtgaattccgtggtcttgcaccacactatcttcgtggaacagcgggagcagctaaggttcgtggcgaagtctcacgtgccgagtctgtggctcaggtcgaagaaatctttgcgactttacgataaatttataaatgatgaaaacttaaccagattggttaggtttttattttacctttattcttccttgatagtgatgatagcctatcgctaatctttttcttggtccacccttgcaaaacctctgtgttttcgatataattaactggttaagtaaatggagaaagcaatgctagaactagaagaacaagtaaatcaattgattaatcagattttgcttaaggctgaaaatcagcatgagctcctcattggtcagtgccgtagtcaggttaagttgaccaatactcaggagcatattctcatgcttttgtctgagggacgaaagaccaattctgagttggctaagaccctcaatgtcagccaagctgctgttaccaaggcagttaaaaccttggtcaaagagggcatgttggaggctaagaaagacaaggatgatgggcgcgtgacctactttgtcttgacacaagaagctaaacccatagcccaagagcatgaggaacaccaccaagagaccttgggggtttatcggtctgtattggatcagttcgataatcaagagcgtcaggtgattggacgtttcttgacaacattagcagaaaaaatcgaggaataagatgcgctatattacagttgaaggactgagcttccagtatgatgcggagcctgttctggacaatattcactatcatttggattctggggagtttgtgaccctaactggggaaaatggagctgctaaatcaacgcttataaaggctaccctaggaattcttaagcctaagaagggaactgtaaccatctcggaaaccaataaagatggtaaaaagcttcgcatggcctatcttccacagcagattgccagctttaatgcaggttttccaagcacggtctacgagtttgttaagtctggtcgttatcctcgtcagggctggttccgtcgtttgactaagcacgacttggagcatgttcaacgtgcccttgagtctgtaggtatgtgggaaaatcgtcacaagcaaattgggcgtctctcaggtgggcaaaagcaacgtgctgttattgctcgtatttttgcctcagatccagatatttttgttttggatgagccaacgacgggtatggatgcaggaacagccaatactttctatgaactcatgcaccattcggctcacaaacatggcaagtctgtcttgatgattacccacgacccagaggaagtcaaggagtacacagaccgtaatattcatctggttcgtaaccagaaattgccttggcgttgtttcaatgtccatgaaaaggatggagaggagcacaaacatgattagtgaattattagcctatgattttatgcaacgtgctattctctccgtgattgctatcagcatcttttcgccaattttggggctcttcttaattcttcgtcgtcagagtctgatgagtgacaccttgagtcacgtgtccctagctggggtggctgttgggattttcttgggccaatcaaccacttggatgacccttgtggttgtggttatcgctgctttggttttagaatatctcagggttagttacaagcattatatggagatttcaacagctatcctcatgtcaatgggattggcagtggctcttattcttagtaacaaggcaggtagcagtagcatgagtctggatagctatcttttcggttctatcatcacgattagctctgagcaggttcgtgccctctttgttattgcggccattgtactggtcttgactctactctttattcgtcctatgtatctgttgacctttgacgaggacactgctcatgtagatggcttaccagttcgtctcatgtccctcctcttcaatattgtgacagggatagctattgccctgatgattccagcagcaggatcacttttggtttccaccatcatgattcttccagcagctattggtatgaaaataggtcaaacctttaaatctgtcattttctgggctattggtattggtttggttggcatgctctctggtatttttatttcctattattgggaaacaccagctagtgccactattacccttatcttcatcgccttctttggtctggtatccatctttgaacctctcttaaaagcagaatagataatagaagaaaagggcttgagaaatcaagctctttttgtgatatactaaagtggtttttgagagaagttaaaataagtagatttctaggcagaaaaaatgattagttttttctggtgtctactattatttgtaacagtaacaaaaaaggagaaagcatggaaatctttttaacgagtatatcgggaatactagtcatcttgggtatgattttagtgggattcgttatgggcgaaaaaggctggtttgatgacaagtcacgtggtcttatagctaagctagtcactcaaattgccctgccttgttatatgctctatacaatcacacagcgtttcacagcgacagacctgctcaagatgttaccagaattgcgttttcctgctctgtctatggtgattttgcttggcattgcgacagcggtggctagcatttttgcagtgaaaaaggagcgtcgtggcctctttatttccatgttttttaattcgaatactatttttgtggggctccctatcaatcaagccctctttggcgatgctagtattccctatgttcttatctattatatgtgcaatacgacctttttctggaccttgggaacttaccttattcagcgagatggggaaggagaggcagaatttgatttaaaaacaagtctgaaaaagatcttctctccccctctaatgggtttcatgttaggtcttattattgttatccttcatataaaattaccaacttttttagccactgacttgaagtatttgggtagtttgacgactcctttatctatgattttcatcggtttgtcagtgtcaaatgcaggtgtcaagcagttggttcttaaaaaggaccaggtattgattttgttgggacgctttgtagttgcccctctcttgatggctgccattgtttactgggcacctctcccaactttgatgaaacaagtttttatcatccagtctgccatgcctgtcatgaccaatgctccagtagttgctaaactctatggagctgatagtgattacgcagctgttatggttactgagactacccttgcaactatggttgttatcccaattttgatggttttgatggcttaaaaataatcaagtaacccctgtttttctgggggtttttaaatttgtaaaaaaattcaaaaaaagtttacgaaaacgctttacaaatcgtaaaaagatgctataataattacataagttatgcaagcgtttgcatcaaacgtaggaggaaatgaaatgaataagctaaaagaaaaatttggctttgagttctggcaaaaattcggtaaagccctcatggttgttatcgcggttatgccagcagcaggtctcatgatctcactcggtaaaacagttgccatgattaatccaaacatggcaccgctcgttattactggtggatttcttgagcagattggttggggggttatcggtaaccttcacatcttgttcgcccttgccattggtggtagctgggctaaggaacgtgcaggcggtgcctttgcggcaggtcttgcctttatcttgattaaccgtttgactggttcaatctttggtgttacttcagatattcttgctgataaggctgctacagtccacaccatttttggtcaatcaatcaaggtatctgattacttcatcagtgttttggaagctccagccctcaacatgggtgtgttcgtaggtatcatctctggtttcatcggagctactgccttcaacaaatactataacttccgtaaattgccagaagctttgtcattcttcaatggtaaacgcttcgtaccattcgtagttattcttcgttcagctatcgcagctatcgtccttgctatcgtatggccagttatccaatcaggaatcaacggcttcggtatgtggattgccaactcaaaagaaactgctccaatcttggcaccgttcttgttcggtactttggaacgtcttctcttgccatttggtctccaccacatgttgactatcccaattaactacactcaattgggtggtacttaccacgtattgactggtgccgctaaaggtactgaagtattgggtcaagacccactctggcttgcttgggttactgaccttgcaaaccttaaaggtgcacacccagaacaatacaaacaccttcttgaatctgttacaccagcccgctttaaagttggtcaaatgatcggttcattcggtatcttgatgggtatcgtcgtagccatctaccgtaacgtcgatgatgataaaaaacatcaatacaaagggatgttgactgcaactgcacttgcaacattcttgacaggggtaacagagccaatcgagtacatgttcatgttcgtggctactccactttacatcgtttatgctttggtacaaggatgtgcctttgccatggctgatatcgttaaccttcgtgttcactcattcggttctatcgagttcttgacacgtacaccacttgctattaacgctggtttggcgatggatatcgttaacttcatttgggtaactgtactctttggtgttatcatgttcttcatcgcgaacttcatgattaagaaatttgactacgctacaccaggacgtaacggtaactatgagcaaggtgatgatgctccatcagaatctgctggatcagcaagtgctggaacaagctcagcaagctcacaagttatcaacatcatcaaccttcttggtggacgtgctaacatcgtcgacgttgacgcatgtatgactcgtctccgtgttactgttaaagatgctgataaagtcggaactgaagaacaatggaaagctgaaggagctatgggtcttgtcatgaaaggacaaggggttcaagctatctatggtcctaaagcagacgtattgaaatctgatattcaagacgttcttgattcaggtgaagttattcctgaaacacttccaagtcaaatgactgctgttcaaaaagcagaagctaccttcaaaggtgtgactgacgaagtacattcagttgctgatggtcaagttatcaacatcgaagatgttaaagacccagtattctcacaaaaaatgatgggtgacggtttcgctgtagaaccagaaaacggtaaaatcgtttcaccagtagctggtaaagtgacaagcatcttcccaactaaacacgctcttggtttggtaacagacaatggtcttgaagttttggttcacatcggacttgacactgttagtcttgaaggtaaaccattcgacgttaaagttactgaaggtcaaacagttgctgcaggtgatctcttggttgaagcgaaccttgatgctatccgtgaagcaggtcgtgaaacatctacagttgttgtctttacaaatgtagatgcaatcaaatcagttaaagtagaacatacaggtaaattggctgctaacgctccagttgcaaaagtagaactttaatttgctaaacgataaacaagcagacagcccttgggctgttttgtttgtaaatgaccctatgtcatttctagatgcaagtcagaagagggataaacttatgaaatttctaactttaaatacccacagttggatggaagaagatgcagaagggaaattccaaaccttaaaggaacagattcttaaagctcagtatgatattatttgcttccaagaagttaaccaagaaatagagacttctgttgtagacacggatgattactatcatgcacttccatcagcaacaccaatccaccaagatcactttgtccgtcttcttgtggaaaagttggctgaagaaggtcttcaataccattggacttgggcttataatcacattggttatgatcaccttaatgaaggggttgccgtcttgtcacgtcaaccattgacagctagcgaaatcttggtttcagatgttgatgatccaactgactaccatacacgccgtgtagcagttgctgaaaccactgtagatggccgagaagtggctgttgctagtgttcacctttcatggtgggacaaaggtttccaagaagagtgggtacgtattgaggaacgtttcaaagctattggaaaaccactcatcctagcaggtgactttaacaacccagcaggtcgcgaaggttatcaagccattttggctagcccactcaatcttcaagatagttttgaagtagctaaagaaacaactggtagctatacagttggacctggtatcgatggctggaagggcaatgaagagcctttacgtatcgattatgtctttgcaagccaagagtggacagtaaatcgccttagtgtcatttttgatggaaacaatcaacctctagtaagtgatcactatggccttgaagcagaccttgcatttagatagtaactgtagcctatcttgacctaataagggtaaaaagtattgtcaaaagataaataaaagagtagaataaagggtagaattgatttttttaaaggagaaactaatggctcatattacatttgattattcaaaagtattagacaaatttgttgcaccacatgaagtggaatacatgcaagcacaagttacagcagcagataatgctctacgaaacggaacaggtcccggagcagaaatgacaggctggttgaatctgcctgaagaatatgataaagatgaatttgctcgtattcaaaaggcggctgctaaaatccaatctgatagtgaagtgttaatcgtcatcggtattggaggatcttatttaggggcacgtgcagcgattgatttcttgaataattcttttgtaaatctacaaagcaaggaagaacgtaaggcacctcaaatcctctatgctggaaactctatctcatcaagctatttggctgatttggtagactatgtatcagacaaagatttctctgtcaacgttatttctaagtcaggaacaactacagagcctgctattgctttccgtgtcttcaaagaactcttggttaagaagtatggtcaggaagaagcaaataaacggatttatgcaactacagaccgcgctaaaggtgcagttaaggttgaagcagatgctaatggctgggatacttttgtagtgcctgatagtgttggtggtcgttttacagtattgacagcagtgggactcttgccaatcgcagctgcaggggctgatatcagcaagttgatggaaggagcaaatgctgctcgcaaggcttatgcttctgataagttggctgaaaatgaagcatatcaatatgcagttgtacgcaatatcttgtaccgtaaaggttatctgacagaagttctagctaactacgaaccatcattgcaatacttctcagaatggtggaagcaattggctggtgagtcagaaggtaaagaccaaaaaggtatttacccaacttcagcgaacttctcaacagacctgcactctttggggcaatttattcaagaaggaactcgtatcctctttgaaacagttattcgtgtagataagcctcgcaaaaatgtgttgattcctgaattagcagaagacttggatggccttggctatctgcaaggaaaagatgttgactttgtcaataagaaagcaacagatggagtgctgttagctcatacagacggcggagtgccaaatatgtttgtgaccctgcctgagcaagatgagttcactttgggctatactatttacttctttgagttagctattgctctttctggctacctgaatggtatcaatccatttgaccaaccaggtgtggaagcatacaagaagaatatgtttgccttgcttggtaaaccaggctttgaagagcttggtgctgagttgaatgcacgtctttgattctcatatgctttgagttcatttagaatataaaaagatccacaagttcatttctagtggattttttagtacaagcctcttaattagtttattaattttttgaacagtgtaaaaaagagtgtcttaattcttttatgaaagcgctgtataattgccttgtaaataaaatttgagaggtatcaaaatgaatgattggttagacattaaaggcaaaacagttcttgtgacgggtgcgtcatctgggattggtaaggcaatagtcgaagaattgttggaattaggagtcaatgtagcgaattttgatcttagcgacaacgatttgcgtcacccgaatctattatttgtaaaagttgatgtaacttctcgctctgaagtagaagcaggagtcgctaaaatagttgaaagatttggcaatattgatgcggtagtcaataatgcggggattaatgtacctagattattaatcgatgcagaaaatcctaaaggtccttacgagttggacgatgagacgttcgaaaaaataacaatgattaatcaaaaaggtttgtatttggttagtcaggcagtaggacgtattttagtgaaaaatggaaaaggtgtaattgtgaacatggcttcagaagcaggcttggaaggttctgaaggacaaagtgcctatgctgcaacaaaagcagcagtctatagttacactcgttcatgggcgaaagagcttggtaagcatggtgtacgtgtggttggaattgctccaggaattatggaagctacgggacttcgaactctttcttatgaggaagctcttgcttatacccgtggaaagacggtagaagatattcgagctggttatgcttcaacctcaacgactccattgggacggagtgggaaactacgtgaagtagctgatcttgtagcgttctatatttcagaccgttctagctatataacaggtgtcactacaaatattgccggaggtaaaactcgcggataaaacaatgaaggtggggaagagagttgaccttagtaaatcgatggtataatattttagacaaaatggtttcgcagccaacttattccttggtagatatgcgctcagaactggatattagtttgcaaaccttgcaaaagagtatccaacaattaaatgatgttttggctcctaatatccagattatctcacaagatgatctgttaatgttggaagtgtatgactatacagagttggaaaggattttatctggtagtttaaaacaggagagtgacttcaattcttccagtaaaagaattgcctatttgctaaaacgtttaattgagtcaacctcccctcttcttattgacgacttggctgaggaagtaggtgttagtagaagtacccttaataaggatttaaaacaagtaaaatctttggcagagagttactctattactatttcaggaaagcccaaccgtgggctggaggtcttggggagcgagctgaatttgcgcttgctctatattcaccaagtggctccttactttgaagaaaggacactcactgaggcaacctcttcttttctggagacgctagtccaggactataaaatccctaaagaaacacaggaactccttcgaaagaccatttcaattatggtggaacgtattcatacatctaaggtgttgaattgtcctattccttattataagaatgatttaacagagacacctttggctgagaaattaatctatcatattgagatgacttataagatttccctcagtcagtttgaaatagactttttgtgttttccgtttaatgtccgttttattgacactttaagcaagccgtcttatcaatctgaacaggttgcaaacatttttcaagggattgtcaagaaagtcaaagaaacaatgttggttcactttgatgatgaagaattatttgaagaaataaagtctcatctaggcgctttaatcaatcgactgattttccatgtgcaagctaatgatatatttcatggcgaggttcaaactcaatatccttttgcttttgaaatggcgaaaattgctggagaagaactatctgcaattttgggttcagaattggaattatctgaaatcggatatctggctttgtattttgaaatgattttaagaaagcaaaattctgctgttaagggttctcgcaagcagatagctgtagtttgcacaacaggaagaggaaccgctgcgatgattattcagcaactcagacgagtccttggaaatgatgtagacattactcagtattctgaagaggattttaatgtggaattgaatcaggactatttcgcgatttttacgacagttcctctaaaatataaagattctaaatctccagtcattcaagttaatcatctttttgatgatcaatggctgcaggaagaatggcagaaagccaatgcttttcatcaaaaaaatctagaaacagttagcttacgctttcttcgattaagcccccaaaaaacctatcagcaatacttgctaaatatggttgcagagttagggaaacttcagatgattgataaaggttttatagaacggataattgatagggagaaaaagcaatcaaccatttttggtggaggaattgccttcccccatacaattaaccagggttatgcaaagactattttaatgtttggaaaactagaagagccttatcaaaaaggagatgaatggattgaatttatctttctagtcgccattccctcagaaattgaaacaaaaatggaaagtgaattactggaattgtatgatgatatttttagaattgcaggagagccttctctgaaagaggcattgagatcggtagaaacagagacagagtttctatcattttctaagagcaaaggagtattttaatgaattcgctaataattttcgccgtatttgtaatggcagcttatatatttcaaatgttcctcggctggcagcaactcaaagacttcaataagacctatacgatgctccgaaaactgggtcgcgtagcgattggcaggaagtccggaagaatcaaatccggtacgattgtcatgttcgcggttgatgaaaacggtcgggttcttaaagctagcaaaatgcaaggagtcacaatcttagcgcgttttcaaaatatggacgattatgttggagaagacatccattattttgacaagtataatcctcttgtgagaaaagaaaataagttgatgcaatcagccatagaagatgctagaaaagtctatcttttgcatgaggcaggtattgagaaagagacaagttcatctgattcttttttgggatttggcttttatgcgaattacttacaattatctattaaacagttattaaaaaaaaataagaaaaggggttccttatgaatcacattacaaaatttgcagagaattttatgaaactcttccaattaggtggagaaacctttattagctggatgacaaatattgtaccgcttgtcctaatgctattgattgcaatgaatacccttatcgctttcttgggagaagagaaggtcaattccctggctaagatttctgccaaaaatcctgttagccggtatatgattttacctttcatttcagcctttatgctggggaacccgatgtcaatcagtatgggacgttttttaccagaatattataaacctagttttgtagcagctcagatgcagttctgccacacttcaaatggtgtatttccgcatatcaatcctggggaattgtttgtatggatgggaatcgcgacagggattcaaactttaggcttgagtcaaatggacttagccattcgttacatgcttgttgggattgtcatgaactttgtaggtggctgggtaacagattttacaactgcttatgttgcgaaacagcaaggggttaccttgagtaaaacatttgattgatagaaagagtgaatttatgtcatataagagtataaaagttgttaaaggaaatggcggtttcggaggacctttggtcattactcctagtgaggcaaagcataaatttatctatatcactggcggcggagaaaagccagatattgtggataaaattgctgatttgacaggtatggaagctgttaatggatttaaaacatctattcctgatgaggaaattgctttggcaattgtagattgtggcggaactcttcgctgtggaatctatcctaagaaggggattccgacgatcaatattgtcgctacaggtaaaagcggacctctagctcagtatattacagaggaaatctatgtatcagcagttggtcttgatcaaatttccgctgctaatgaagatgaaaaagcgacaacggtggttactgaaaaaccaacttacgatactagtaaaaaaatcacagaacaaaaagcagaaacaagtattgtagcaagaattgggatgggggctggtaaggttgttgcgactttcaaccaggctgctcgtgaagccatccaaacaatgctcaatactattattcctttcatggcctttgtttctttactaattggggttattcagggttctggtgttggaaattggctggcaaaactaatggttcctctagctgggaacatttggggactcattttgattggctttatctgttccttgccattcttatctcctttgttgggccctggagctgttatcagtcagattatcggaaccttaattggagtcgaaatcggaaaaggaaatattccgcctcaaatggctctgccagctatatttgctatcaacactcaaaatggctgtgatttcattcctgtagcacttgggctatctgaggcgaaagctgaaactgttgaggttggtgtcccttctgttctctattcacgttttctcaatggtgttcctcgggtcttagtagcttgggtcgctagtattggtctttatcagtagagcatggttaggttgtgcacacatataaaaaatagtatcttaaacttatctattaggaacatgaaagattagagaaaggatggatcggaattagatgaagaaaatttttgaagctaaagtaattcaagtgggacctgaagctcagaatatgattcaagacgctaatatgctcattttatttggagaagaagctccgggagacttagcagagtattgttttaagattgataacaaaaatctgctaggttcaatactagaaggcggcaagctggtggtagataatcaggaatattcgattactgccgtgggaaatgtagtagaaaaaaatttaactggactgggccatatcactatttcttttgatggttcaaaagagggcagtctgccgggcactctccatgttgcagcagaccaagcagtagtaattgagaaaggttctaccattcagattttctaagtagctcaagtaggatagaaaatcaaatcctgtaaactatcaaagcagcagcctaaaactaaacgcagcctcccttaggggaggttcggattgaagacaaagtccttagaagacacttttctaagggcttttctttttgtaaagttgtataatagaggtaagaaaagttgtgaggtgctagctatgtttcacaaagaaaaacctgattatcatcgctgccaatatggcttctatacgatagacgaattggtcccagaagatcactttcttcgccaattggaatcagaggttgatttcgactttatgatactgtcaataattttgtgtaaacactcaagtagagttatagagtgctaatcaaataagctttcaagtgtgtcagaacattgtccaaaccctttatggattcgttgactttgcttgaaattataatcttcaaacaaagtaactaagtaacgttccagagcctcctcgttaggaaaaagaaccttctttttcgtttgacgtttgatttctttgttaagagactcaatgaggtttgtcgaataaatgctgtgccaaatttgatagggaaactgaaaaaaagttaaaagattatccgttttctccaggctttccgtgactttcctatactttggtttccattcggcgataaagtcctctaaagcttgtactgccatttctaaattttcagcacgataaatcattttaaattaccccagaataaccgctcgatcagatcgtttcaccctactagccagatttcgactaatatgaatcaagcaacgttgttgtttagctaatgggtaagcctgactgataatctgctcaagcccttagaatcacaaaaacaactagatagcttacgagtacgtaaaacagataagattgacgctgaaaaactagctacgtctcagttcatcctcaatcgtaaaccaagctatgtccaagaagtgctttatcaagaattacgcgacctcagccatttctatcagaatcttactggggatattttctgcgctaaaaatcgtctgcacaaggttctacaggtctcttttcctgaattgtaaaacatcttatcttcaccaactgtgggaacaatattggaacttggtcatgacttttccatgtaatagttttgtactggagttagatgacgccgaattaacagctatcatccgtcagtctacggcaaaacgcatctctgaaaaacgtgtgacttacttagtagataagcttacaaaactagctaatcagtcttattgtgaggtcaagaaaacctctccaatgatggaagagatcaaatactatgcaggggagttacttaggctttctgaatatagacaaggcgttttagaggagatggtaactttggctcaacctttgccagaatacgagattcttctctctattcctggaatcactgaaaccacagcgacaagtattattggcgaacttggtgacattcgtcaatttcattctgccaatcaaatcaatgctttgatcagcattgacctcagccactatgaatctggggactttctagcaaaggaacatatcaccaaacgtgggaatccctatgccataaaggttctctttaagtgcattcataacatagcttcagctggctacaccaatccttgtcatatagcagacttctatgagaaacggaaaagacaatcgcaagtgacttcaaccaaaccacacacgattgcctctacacatcgtctcattagaacaatgtattacctcataacacataacaagctttacgattatacttctacccaaaatcggtaaaattgtttatgccatatgattgtaacaccttatcaaaaaaccactaggtaaggtgttgtttttgcgtgcactttttacactaaactttagttcaaaaatagacaaactccttagtttgactatgtaattcaatctatttttttatcaaatgccttgatatgcttgacaaatggtagaaaaggactcagtcctgtgcaatacagaactaaatcctttggataaattaattgtctaactttttggggtcagtacaatttttatgggactttttgtgtatactcaaaaagctctataatctctacagtggttttacaaatcacagaaataaaaaaatctgaattattagcgaaattttgttctttaaaggaaaatagagtttaattggaagtggtataacaaatttcgtttttattcatttaaatagttgttaagaaaaattgatttagattatctgataataagtttttacttgacaaattgaagatagtcatcttttatgactataccaatttaattgttgacaactaataaaactaggtatataatgactttgttcggttcaataataggatattgaactataccaatttgtaggaaagggatagtaatttaaaagttgctacaggtaataattaatgtgtggaattgttggagttgttggaaatagtaatgcagtggatatcttaatacagggtctcgaaaagttagagtatcgcggttatgactcagcaggtatttatgtgactgatgccccagataaaggttgtctagttaaatcagttggtcgtattgcagatcttcgtgctaaaattagctccgatgttaagggatcaactggtattggtcacacgcgttgggcaacacatggtcaagcaactgaggataatgctcacccacatacttcggaaacagggcgcttcgttttagttcataacggagttattgaaaactatctccaaattaaagaagaatacttgcaaggacacaaatttataggtcagacagatactgagattgcagttcacttgattggtaaattcgttgacgaagatggattatcagttcttgaagccttaaaaaaatctcttcatattatccaagggtcatatgcgtttgctcttgttgactctcaagcaccagatacgatttatgttgccaaaaacaaatctccacttttgattggtgttggtgaaggttacaacatggtttgttcagatgccatggctatgattcgtgaaactagtcaatttatggaaattcacgataaagagttggttgttctgaccaaagatgctatcacagttaccgattatgaaggaaatgctattgaacgcggtacttatacagctgaacttgatctttctgatattggtaaaggaacttatccttactatatgttgaaagaaattgatgagcaacctactgtaatgcgtaaattgatttctacctatgcagatgatgaaggaaatatcactgttgatccagctattgtcaagtcagtacaagaagcagatcgtatttacatcttagcagctgggacttcatataatgctggttttgcgtcaaaagctatgtttgaaaaattgacagatacaccagttgaaataggtgttgcatctgagtggggttacaacattccacttttgagcaaaaaaccaatgtttgttttgcttagtcaatcaggtgaaacagcagatagccgtcaagttttggtgaaagctaacgaaatgggaatccctagtttgactgttaccaatgtacctggttctacgctttctcgtgaagcaacatatacgatgcttttacatgcagggcctgaaattgctgtagcttctacaaaagcttatactgctcagattgcggctctagctttccttgcgaaagctgttggtgaagcaaatggcaagaaagaagcacttgagtttgatttagtgcatgagttatcaattgttgctcagtcaattgaagcgactctctctgaaaaagatatgatttctgagaaagttgagaacttgttggctacaactcgtaatgctttctacattggtcgaggaaatgattattatgtagctatggaagcatcattgaagttgaaagaaatctcttatattcaatgtgaaggctttgctgcgggtgagttgaaacacggtacaatttcattgattgaagatggtactccagttttaggattaatttctgcaagtgaagttgtggctgctcatactcgtggtaatattcaggaagttgctgctcgtggagctaatgttttaacagtcgttgaggaaaaattagctaaagctgatgatgatattattgtcaatcaagtacatccattcttatcaccgatctcaatggttattccaactcagttgattgcttactatgcttctctacaacggggtcttgacgtggataaaccacgaaaccttgcaaaagcagtaacagttgagtaagttagtttccgcattctaaattttattagctcttttttatcatttatcaagtctatcaaagctttaagttaaaaatgagataagacagtactattctgagtttattgtcttagttttaacaatttttgagccataaaaaggcatgctaaaaaatacctttcctggtatttttgatcaaggtttcttgccagcttgtcaagtgacgtatagcgctatactacaattttacaagaccccactactttaacctaacgaaaaagtagtgagtactctctggttggagattttctcactactcatcttagtatgtttgtcaactgtagtgggtggcgaaaagctaacatctagagaggaccagataggtcttctctttttttatgtttagagtgatgaagatacgtttcttaaagttgatgaagtttctaaaaccgaagcccaaccgtttgatgtctttaatcaacttgttagtagcttccagttttgcgtttgaatagtctgtttctagtgcattttggatgtattgcttgtgtctaagaaaagtcctaaagaccgtttgaaaatagtgattgaccttgcttctattttcctctatcagctcaaagaactcatctactctcttctcctgaaagtgaaaaagcaaaagctgataaagagtatagtagtcggtgagctcttctgaaaagaccaatgtcttctcaatgacttcatgtgggcttaaggtttgacaaaatgtcttcgagtgaaatgagttacaagatagcttacgactgtccttttgaaaaagtcgccagtgatttttcaaggctcgataaggtagtgacttcttatcgaactggttcataatcgcaattcttgtctttaaaaaggcacgtccaaggtactggataatgtgaaatcgatcaagaacaattttggcgttagggaaaagtcttcgagctagtggcatataagttcctgacatatctatcgtgataaactgtaccttttggcgagctttcaacggatacttcaaaaagtagtttcgaatagtggtttgacggcgattatcgaggatagttatgagtttgttggtctcatagtcttgcgccacaaaagcgagttcacctttcttgaacccaagctcatcccaggacataacagctgggagtttgtcataatgctccttgaaagtaaactggtcaagtttacgatagacagtggatgtcgatacacgaagtcttctggcaatatccgttaatgatagcttttcagttagaagttgagcaaccttttgtcggacaaggtttgagatttggtgatttttctcaacgattgatgtctcagcgaccgtgactcgcctacaacttttacactggaagcgacgtttcttcagacgtagtagtgtcggagttccagcttgctctagaagagggattttagaaggtctttgaaagtcatatttaatcatctttccttggcaatgtgggcatggtggtgcagggtaatccagttttgcatgaatttcgatatgagtatcagtttcaaaaacaagagaaataatgatgttagggtctttaattccgattaattctgtggtattcttaataggtctcataagttcttcctaatggtagtttcgtcgcttttcattatagttcttatgggactttttgtgtatactcaaaaagctctataatctctatagtggttttacccactacagaaattatagagccgtaatcagataagatcagctttggctggtctttttttaaccatttgtaggctaaaactctccattaatgatttcttgtagcttaatttacgaacttttattctaaacgtttcggacgggctagttgggttttgtggctctttaatttagggatgattgttgctataattagttcaagtataggaggatgaatcatgattggacctgtggaaatgggtgctttgttgaaaaaaattcgtttatcaaagaatttgacattgaaagaacttgctagtgattatttatcagtatctttcctatcaaaatttgaacgtggggaatctgatatctcattatctagattttttcttttgttagataaattggatgtcagtattgaagagttctatggtatcttatctcaagataatccgactcatactgaaaagttattagaaagtgctagtaaggcttattatcaaaacgatagtttatcgttacagaagtacgctggagaagagcgtcataaatttgagctcacacaagacaaatcatttctctataacagtattatgctagaatcttttttggcaagtgtttcaaataaagaggttgatgaaaataaggtaagggaattaacagactatctttttagcattgaacaatggggaaaaagagagttaatcatattaggaaatagtatgtcgtttatttccacccagacacttaatgttttgaccaaggagattgtgtatagaactagactttttggaaatagcgactcaaatcaaagaatccgaattagtcttctcattaatgcagcttatgaatttttacgacgtgatgaactagatttagcgaaatactatttagatttagtcaatgatagtggaattcctgaggtcctcttatatgaaagacatgagttgatatttgtgatggggtcttacttgataaagtcgggtgaagttgctgaagggagaaatctaattgaggggtgtttagaaactcttaggactttaggtgcggaaaagttattgcttgctaaggaattagagtatcaagaactactcaattccactatatgacaattttttagagtgagttaaaaaatagaataaactaagaccatagtacgacatcactatggtttttaattttcaatggatatatggtattccaatgtcttcaatttatccaactgattatataccaaggtgatttagattgtgaggaaatctatgagaacctatattcttaaatacaagtatgacaatttagttcatatcttactgttagcactgaattctgctatttttgtgagtgcctcggtaaccttagctttaatgacgaatcagctggtatcgaagcgaatccaatcttttttagctctattaggtctagaggtggggctttacgttatttatttagttttgaattatgttattgctgtacatcaaacaaaattaatccaaaaaatggctttgtctattcgtcagtcttatcttagtaaaattattcaccattcttttagtgaattcagaaagagtgatattggagagcatctctcagtattaaataatgatatccaattgattgaatcaaatggttttacaagtatttataccctttgttcaacagtatttaccactttgttttcaattatcgccttattaagttatgatgtaaggattgttctgctagccatttttttaactttgtgtctgacctatcttcccaaaccatttaccaataaaatgcagaaatcaatggagatattttccaaagcgaatgaggagcttgtttctggaataagcgatcagttatatggatatgcggatgtttattacgccagtcgtaaacagatatttcttagacaggtgaggtccattgttgagaaatatattgtacaaaaaattatttttacaaaaagaaagactagtactgagacgctgatggctttattttcagttatcgcccagatgttgatacttcttctaactggcttgttaattatttttggaaatattactgttggaaccattgcctcagtaggacagatatcaggtaatatttttaactctctatccaccattaatcagctacaagtgaccattaagtctgtcgatccgatcttaaaaaaatttcacgattttccagagggtccaaagacttgcatagcgactattcaggatgttcgttttgagaatgtaagttatcattttggagataaggctatttttgagggattcacccaaacctttaaaaaaggaggcaagtatgctattactggatgctcaggtagtgggaagtcaaccctgcttaatatattcctaggcaatcttaaagattacgagggaaaaatcttgtttggacaattggagtcaaaagagattgatgagaactcaatcgtgtctgaatgtgcctatgttgggagtcaaactcatatctataatgataccttgaggaacaatctaaccctttggaacgaagctattactgatacacaaatcaagaaagttcttgaaagagttaatcttttatctttcttaagtcgtatagatgagcaagtaagcgacggtagcttttcggagggccaaaaacaaagaataggcctgataagagcatttttaaaaggatgttctgttgtgatttttgatgaagccactgcaaatcttgaccataataatgctactcgtattgagcaccttttattaagtgatcctaatatcacttatatcacggttacccaccatcttataaaggaaaatgaaccatattttgataagattattcgtttgggagaggccactgagtaaatgtttcatatgataaatgcttaggatttatttcaattttactaacggcagtcaaagtgctataatgtaagggattgtgaatttagcaagctttgctattttcaaaaaagaaaaaacaaatcagagatacaaatctcttagaagaggtgaatcccatgggacgtaaatgggctaatatcgttgctaagaaaactgctaaagatggtgcaaactctaaggtttacgctaagtttggtgttgagatctatgtagctgctaaacaaggtgaaccagatccagaatcaaactcagctttgaaatttgttttggagcgtgctaaacaagcgcaagtgccaaaacacgttattgataaggccattgataaggctaaaggtaacactgatgaaactttcgttgaaggacgttatgaaggttttggaccaaatggttctatgattatcgtagatactttgacttcaaacgttaaccgtacagctgctaacgtacgtactgcctttggtaaaaatggtggtaacatgggtgcttcaggttctgtttcatacatgtttgataaaaaaggtgttatcgtttttgcaggtgaagatgcagacgcaatctttgaacaattgcttgaagcagatgtagaagttgaagatgtagaagcagaagatggtactatcactgtttatactgagccaacagatcttcacaaagctttggaagctctccgtgctaacggacaagaagagttccaagtgactgaacttgaaatgattccacaaactgaggttactcttgaaggtgaagaccttgaagttttcgaaggacttattgatgcgcttgaagcagacgatgatgttcaaaaggtatatcacaacgtagcagatatgtagtctcattcagcactttccgtcataaggaaagtgtttttatgtggtctgtctaaggatttgtcttgcttgtcctgacttaatctgatatagtagtagccaagtgaattattggaggaatacgaaatatgaatatgatgctagttttggccatttatgtggtcgcaattgttgcttatgtggctttcagccgtcgtcgccaagcaaaggcccaggaagatcgttttgcaggtcttgctaagggtgctgaagttgaaacaattggtggtttgattgctattgttgatgagattgacaaagaaaataaccgtattgttttggatgcagaaggtgtcttcttgacctttgatttgagtcgttcaatcatgaaagtaatcacacccgcaccaactacagaaacagcagaaacaactgaaaagacaattatcgaagaagaatcagcaattgagtctgctgatgaaaactaagatgtgtatttgagactaggttaaatcctggtctttttgcgttttctaatcttatcggtattaaaagctgttcagaacccctgaaaatgtggtaaaataaagggtaaactatatttagaggatattccatgtttaaatttagaaaaaaatctcatcaagaggttctagacaatattcccaaccatatcggtattattatggatggaaatggccgttgggctaaaaagcgtctacaaccacgtgtgatggggcataaggctgggatggacgccttgcaaaaggtaactatcgaagcatcacaacttggagttaaggtattgacagtttatgccttctcaactgaaaactggtcacgcccacaagatgaagtgaaattcatcatgaatttgccagttgaattttttaacaagtatgtaccagaattagacaaaaacaatgttcgtattttgacaatcggagataacagtcgtctgcctaaggaaaccttagatgctcttgaaaaagcagttgagcagacaaaacataattccggtttggttctcaactttgcactgaactatggtggtcgtgcggagattgtatctgcagttcaagcgattgctaaagaggttgaagcaggcaaactcagtcctgaagctattgatgaagatctcattgctaagcatttgatgacagataaattgccttacctctaccgtgatccagatttgattatccgtacgagtggcgagcttcgtcttagtaacttcttgccttggcaatctgcctacagtgagttttacttcacagatgttttctggccagattttgaccagcaagggctacgtcaagccatctctgactacaataaacgtcaccgtcgcttcggtggtgtctagaaaggacctctcatgcaagaacgtttaattggtgggggtgtggcagcagccattttcctcccattgctctttatcggtggtcttcctttccaacttttggttggagctatggccatggttgcagtgtctgagatgcttcgcatgaagcacttggagattttctctatcgagggtattttatcaatggtggcagcctttatcttggctgtgccgattgatcagtattttatcagtcttccaacaaatgctagtgtgacaggtttcgctgttatttcatttttgattctagcggggactgtccttaatagcgaccattattcttttgatgatgcagcttatccaatcgcatctgccttttatgttggttttggtttccaaaatcttattgcggcacgtatggatagctgggaaaaagttctttttgccctttttattgtttgggcaacagatattggagcttacctttttggtcgtcaatttggtcagaataagctattgccaaaagtatcaccaaataagactattgagggtagtgtcggtggtatcttatccgcaatcattgtggctcttatctttggtttgattaaccacggcgtttatgcccctcataacttcttctggttgcttatctgtacgattctctttagtatctttggtcaatttggtgatttggttgaatcagctattaaacgtcactttggcgttaaagactcaagcaatctcattcctggacacggtggtgttttggaccgttgcgatagctggatcttcgttttcccaatcatgcacttcctaggacttttttaagagtggaggtgtctagatgaaagctattattacctttttactgattttctgtgtgattgtcgtcttccatgagtttggtcatttcttttttgctaaacgctcaggaattttggttcgtgaatttgccattggtatgggaccgaaaatttttgcacacactggtaaggatggtaccgtttatactattcgcatcctccctttgggtggttatgtccgtatggctggttggggtgaagatacaactgagattaaaacaggtagccctgccagtctaacgattggatcagatggtaaggtaagacgtatcaacctttcggatcgccagattgatcagacggctttacctatgaacgtcactgcctatgatttggaggataagttaaccattacaggtctagtcctagatgagaccaagacctatgaggttgatcatgatgccactatcgttgaggaggatggtacagaacttcgtatcgctcctaaggatgtccaatatcaaaatgcaagcatttggggacgtttaattaccaactttgctggtcctatgaataactttattcttggggtgcttgtctttattatcttagcctttgttcaaggtggtgttcaagatacatcgaccaaccgtatccaggtagccgatggaggcgctgctcaggtggcaggcttgaaaaatggtgatgccatcgaggctatcaataaggacaaggttactgattgggacagcttgaaggaagcattgacagagaatacccaaaaattctccaaaggtgatagcctttctgtgacagttaagagaagtaacggtcaggaagaaacaatctctgttaaacctcaggagaaccaaggtagctactttttgggtgtttctcctgctttaaaaacaagtcttaaagataagatttttggtggtttccaaatggcttgggaaggggccttcaaaattctcgtagcacttaaggggcttatcaccaactttagtttgaataaacttggtggaccggttgctatgttccagatgtctgcccaggcttcagaaaatggcttgatttccattcttaaccttatggggatgctctcaattaacttgggaattttcaatcttatcccaattccagcccttgacggtggaaaaattgttatgaatattattgaagccattcgtcgtaaaccacttaatcaagaaattgaaagctatattacacttgcaggtgttgctatcatggttgttcttatgattgcagtcacttggaatgatattatgcgtgctttcttttaattagaaacaaagaaacgaaaggaagtctaagggacttgagccaagggccagcctccttagtatgtaaatgatgaaacaaagtaaaatgttgattccaacacttcgtgaaatgccaagtgatgctcaagttatcagtcatgcccttatggtacgtgcgggttacgtgcgtcaggtttctgctggtatttatgcttatatgccattggcaaatcgtgctatcgagaaattcaaaaccatcatgcgtgaggagtttgaaaaaatcggtgcggttgaaatgttggcgccagcgcttttgacagcagatttgtggcgtgagtcaggccgttatgaaacttacggtgaagacctttataaacttaaaaaccgtgataaatctgactttatcctcggtccaactcacgaagaaacgtttacagccttggttcgtgatgcggttaaatcatacaaacaattgccacttaatctctaccaaatccaatcaaaataccgtgatgaaaaacgtcctcgtaacggtcttcttcgtacacgtgaatttatcatgaaggatgcttatagtttccaccaaaactatgaagatttggatgtcacttatgaagactaccgtaaagcttatgaggctatctttacacgtgctggccttgaatttaagggtatcatcggtgatggtggtgccatgggtggtaaggattctcaagaattcatggcggttactcctgagcgtacagatctcaaccgttgggtagttcttgacaagtcaattgcttcattggatgagattccagaagatgtcatggaagaaatcaagaaagaattgacatcatggttggtatctggtgaagacacaattgcctactctacagagtcaagctatgcagctaaccttgagatggcaacaaatgcctacacaccagcgactaaggttgtgactcaagaagaagtgactcgtgttgaaacaccagattgcaagtcaattgatgaagttgctgctttcttgaatgttccagaagaacaaaccgtcaagactttgcttttcattgctgatgatgaaccagtggtggctcttcttgtcggtaatgatcaggttaacgatgtgaagttgaaaaactaccttgctgctgatttccttgaaccagctacagaagatgaagcacgtcaagtctttggcgctaacttcggttctcttggtccagttaaccttcctgaaaatgttcgtatcgttgcggaccgtaaggttcaagatgtggctaatgcggtcgttggagctaatgaagatggttaccacttgacaggggttaacccagagcgcgacttcaaggcagaatacgtggatattcgtgaagttaaagagggtgaaatttcaccagatggtcaaggtgtccttcagtttgcgcgtggtatcgagattggtcatatctttaaacttgggacacgttactctgaaagtatgggtgctaatgttcttgatgaaaatggccgtgctgttccaattatcatgggatgttacggtatcggtgttagccgtatcttgtcagctgtaatcgaacaacatgcacgtctctttgttaacaagacaccaaaaggtcagtaccgctatgcatggggaattaacttccctaaagaattggctccgtatgatgttcacttgattacagttaacactaaggatgaggaagccaatgctttgacagaacgtttagaagctgctcttatggctgaaggctatgatgtcttgacagatgatcgtaatgagcgtgttggttctaaattctctgacagtgaccttatcggacttccaattcgtgtgacagttggtaaaaaagccagcgaaggtgttgtcgaagttaaaatcaaggcaactggtgatactattgaagttaatgccgataacttgattgaaacacttgctatcttaacaaccgaacaagatgcttaatctaaaaaatcttttcttgcaggagcaggaagagatttttcttttgcagtgacaatgataaattgagagaaaagagagtaaattccaatttgacagaattgtctaaatagtgtaaacttaaaactatcataactacggaggcatcacatgcttaacaaagcgacccatttgggaaatcttaaagctttttattactttagtttctttagataggacgtttgtgtttcaggatacaagcgtcagtcagtttgtatctatgaagctaaagcattttgtgatggattagccgattagatgaataggtctaaccggtgacataagctagcctgtgctagtcaagatgcataaaaccagttgggcctgtcctaactggtttttttcataccgtggtctatttttaattttcttttgactctatcatctcggaaaaaagatgacagaaaattggaaatagatagaataaaaaatagaggtatacaagatgaagaaattcttggtcagtatgatggctgttattacagctgtcctcttggtagcatgttccaatgcttctaataaagatttggttcacgtcggtgtgctccaatatgtggaacatccttccttgtcagcgacacgtaaagggttcattgaagaactcaaagaggaaggttatgtcgacggtaagaacatcaaaatcgattatcagaatgcacaaggagatcagtctaacttgcagacgatttctcagtcgcttattgaagataatgatgtcatgttagctatcgcaaccccagcagcccagtctttgagtagtttgacaaaggacaagccaattctctttacagctgttacagatccagtttcagctaaattggttaagtctatggacaatgttggaggaaatgtgacagggacaagcgacatgtcaccaatcaacaaacaagtcgagttgttgaaaaaggtccttccaaacactaaaaaagttgggattatgtacacgaccagcgagcgtaactcagaagttcaggttgaagaagccaagaaatacttcaaggaagctggtattgaaacggttatcaaaggaatttcatcaaccaatgatatccaagatacagccaagagcttgatgagtcagaccgaagtcatcttcatcccaactgacaataccattgttagtgctattaataccttggtagatctttctaaagagactaaggttccagttgttggtagtgacgctggtagtgtagaaaaaggtgtcctgttcacttatggaactaactatgaagcgcttggacgtcaaacaggtaagttggcaggccgtgttctccgaggtgagaaggtcaaggatgtcgatgccgagtatcctaaaaccctaaatgttgtggttaaccatgacatggctaaagaacttggcattgatgtttctagtattagtgacgaggaatctaaggcatcaacacaagatgacaaaccaattgctaaaaaagataagggtgtcattaagcttaaggttaataagtcatctaaaaaaggattttcaaatgtggtgctaacagccatttctcagggacttctctgggctattatggctattggggtcttcattacattccgtattttggaccttgctgatttgacagctgaaggggctttcccacttggtgctgctacgacaactatcatgattatccgtggaatcaacccaatctttgcgactttaggtggttttgtggctggtatgcttgctggagctgtgtctggctttatgcatacgaaaatgaagataccagcacttttaacagggattattaccttaacggggctctattccgttaaccttttggttcttggaagtgccaatgtctctctatcaggacataatacgctagtaactatggtgacggggcttggtttgtctaagctgaatggtgtgattctattaggactgatttttgttagtctggtagtgtttatgttggttgtcctccttaatacgcaggttggtctggcccttcgtgcgacaggtgataaccttgccatgggtgaagccaatggtatcaaggttgaccgtatgaagattcttggctacatgatttccaatggtttgattgccctatcaggtgccctcctagctcaaaacaatggctatgcggatatgaatatgggtactggtacaatcgtaaatggcttggctgcaattatcttggctgaagttatcgtcaagtatctaccacttggcaaacgcctctggtcaattgtcgtaggtgctgttctctaccgtttggtcttggttattatccttgccatgaatgttgatgctcaaatgttgaaattggcttcagccatcttgcttgcaatcatcctttatgtgccagaagtacgacaaaaattgaaaatcagacctaataaatccttgactccaggaggtgacaagtaatggctttacttagtttacaacagattcacaaaacctttgaaaaaggcacagtcaatgaaaatcacgtccttcgtggtttggatctcgacattgagcagggagattttatctctgtcattgggggaaatggtgctggtaaatcaaccttgatgaattcaattgctggtgttcttagtattgatgagggggatatcttgttggaggggcaatctattaagaaagcatctgtagatgagcgctctaaagacattagtcgtgttttccaagatcctcgaatggggacagcgacaaacctttctatcgaagaaaatatggcgattgcctatcgtcgtggtaagaaacgtagcttttttaaaaagtctatcactgaaagcgaacgtcaagtcttcaaggaagccttggtagatcttggtcttggtcttgagaatcgtatgaagactgatgctaatttcttgtcaggtggacaacgtcaggccttgacacttgctatggcaaccttggtgcgtccaaaaatcttgcttttggatgaacatacagcagccctagatcctaagacaagtgatatggtcatgaatttgacacgtaagatcgttgaagaacaagaattgacaacccttatgattacccataatatggaacatgctatcgaatatgggaaccgtctggtcatgctctatcatggaaaaatcgtcgtcgatgtgcgaggtgaagaaaagaaaaatctcactgttgcagaacttatggacctcttccacaaaaatagtggacaagtcctcaatgatgatgccttggtgctcggttaacaaacaaaaaaagaaactatccaaagttcagattttgggtagttttttcttgactatttttgaccaagtgctaaaataaatatatagattagcactcgtggtttatgagtgctaaaaataacgtttcacacgttactaataacaaataacatttggaggtaattggtatggcattgaaaccattgggtgatcgtatcgttgtccgttttgaagaaacagaagaaaaaacagctagtggctttgtattggcaggagctagtcatgaagctacaaagactgctgaggttttggcagtaggtgaaggaatccgtactcttactggtgaattgattgcacctagtgttgcagcaggcgataaagttcttgttgaaaatggtgcaggtgtcaatgttaaagacggagatgattccgtttcaattatccgtgaagcagatattttagcagtcctagcttaggtctatgctaatcagatataaagtaagataaagaaggagtaactatggcaaaagatattaaattttcatcagatgcacgcgcagcaatggtccgtggtgttgatactttggctgatacagttaaggtaacgcttggtcctaaaggtcgtaacgtggttttggaaaaagcttttggctcacctcttatcactaatgatggtgtgacaattgctaaagaaattgaactcgaagatcactttgaaaatatgggtgctaagctcgtcagcgaagtggcttcaaaaacgaatgatattgccggtgacggaacaacgacagctactgttttgacacaggctatcgtccgtgaaggtcttaaaaatgtaacggctggtgctaatccaatcggtatccgtcgtgggattgaagcagctgtagctacagctgtggaagagcttaaagccattgctcaaccagttgctaataaggaagctattgcccaagtcgcagcggtttcatctcgttctgaaaaagttggtgaatacatttcagaagctatggaacgcgttggtaatgacggcgttatcactattgaagagtctcgtggtatggagactgaactcgaagtggttgaaggtatgcagtttgaccgtggttatctttctcagtacatggttactgataatgaaaaaatggtcgctgaccttgaaaatccatttatccttgtgactgacaagaaaatttcaaatattcaggatgtccttccactcttggaagaagtgcttaagacaagccgtccactcttgatcattgctgatgatgtggatggtgaagctcttcctacacttgttcttaacaagattcgtggaactttcaatgtcgttgctgttaaggcacctggctttggtgaccgtcgtaaagcgatgttggaagacattgccgtattgacaggagcaactgtcattactgaagatcttggtcttgaacttaaggatgcaactatggcagcacttggtcaagcttcgaaagtaactgtggataaagatagcacagttatcgttgaaggtgcaggaagcgcagaagcgattgctaaccgagttaacctcatcaagtctcaattggaaacaacaacatctgagtttgatcgtgaaaaacttcaagagcgtttggctaaattgtcaggtggggttgcagtcgttaaggttggtgcagctacggaaacagcccttaaagaaatgaaactccgcattgaagatgcccttaacgctactcgtgccgctgttgaagaaggtatcgtagcaggtggtggtacagcccttgttaacgtcattgctaaggttgctgaacttgatcttgaaggtgacgacgctacaggacgtaacattgtcctccgtgccttggaagaaccagttcgtcaaattgcttataacgctggttatgaaggttcagttatcatcgataaattgaagaatagcccagttggtacaggctttaacgctgctaacggtgaatgggtagatatggttgaagcaggaattatcgaccctgttaaggtcacacgttctgccctccaaaatgctgcttctgtagctagtcttatcttgacaactgaagcagtcgttgccaataaacctgaaccagaaactccagcagcaccagctatggatccaggaatgatgggctactaagagtttaaaaaagcaaaagaaaaaacctaggaaaagtcgagaaactttttctgggttttcttttttcaattatttgttgttaattactgaaaagggttaaatgtatcagaacttccttgttgcccggccatttgcatcatcatttgttgctgtttgatacgctctgcttccttattcatattgatagaaacaacaagaaggatgacccaaccgatgaaggtccagtttaggaggatggataaaacaaagactagccatttctcgtctgttttgtttaggagggctggtaagataataagtgctacaaaaggtaaagaaaaaattaggaggaaaagtgctaagggtaacgttgccccaacttcatcgctagcaactccaattaaatatattccgagggcccagatgataaatggaatatcagcgacggctaacatgatgaggtttgtttgggttttcttgtcttgtttcttccaagtttcatttagatttttgcttgcttgttggaaagtttcaccagtttgattcgcaaattggttaacagtctgactggcagtttctacaacaggtttaacttgttcctggaaggtctttgattgcttttcttgagctaagttagttgcttggaaagtttcttcttcatctgctgtagagttagtgagtggctcttcagcgacgtcatagctgtcaacatcattttcggtagtttctacaacttctgttgatggtgcaggttctgtaggctcaacaacttctgagccgttcgttgtttctacggtctctttttgtgggacaggttctgttacttcgacagtttgtttgggagtttctcggacaaactcgcctttctgagctgcttcagccatttcttgaatacttggattacgaccattaactgcttggaaaaaatcgatccaatcttgttgcttcatgtgtataacctccagatatcttgattataaaaatgttgataattacaattatatcaatagtgtaaggggactacaatgggagtctttactttatttccttataatcttcttatcactaaagatgggaaagagaaagaaataggttaggatatagaccactagaggatatatcagtggattatagtcccaggctccttgccaatctaggtgtaagagtctgacactagcgcgtgttagaccggcactccaagctttaaggccaaatggtcttaggattaaactgagtggtgttggaagatgtaaaaggtagactccataaactgccactaaaactaagagatataatctaaaaaaacgctggtggtaggcccacaagcgtgtaaaatagtttttcattagccaataactgcaaatagtttttgagcgtttgattggcgagtagcatccatgatgaggaataagtcaacgattgaccagataccacatccaccacacgtcaaaagtttaccaacaccgagaccaatttgtcctaatagaaagcggtcaattccaagagtcccacctagaagtgaaataatcaacaacattgttggatcttggaagctgattgagtaaagcattgaaagttgttgctcaggaagtgcttcaagacgttgacggatgtactgaacttgttctgttgggaaatacttggcgttaatggttatccattgatcgactggattcataaattaaatacccctcaaattttaaatgatatgtaaaggataacatattgtaaagggagattcaaggcggtcaaggtttttgaagtcaataaaagtaacttatttgcaagcttccactgtgtcataactagaggatcattaggataatcctttcgcactatgcttgagaataagcctacttctattatttgtgatttctcaacccttgttcaaaactgtctgaactcgccttaacagtgattttttcgagtgttaagggatgggtgaaactaagagtgtgggcgtggagcatgagtcgagatgcggttcggtgactataaagagggtctcccagaatggcatgtccatggtgggccagatgcacacgaatttggtgggtccggccggtttttagttggcaattgaccagactagctcctttaaaggttttgaggcgtgtgacgattgtataggcaacctgcccttttctagggtcaaccacccgttttctacgatcgtggcggtcgcgtccaatcttgtcattgtacacagtctccttggtttggaatttaccttcagctaatgcccagtattgacgctgaatattcttatcttccaagagtcgattgagaattggcaggataaacggatttttagcgaagagcacagctccactagtctccatgtctagtcgatgaacgacgtaacaggtctgcccacagtaggccgaaacatggttaagaagagcaatttctgtgggttcattaccatgcgttttcattccttcaggcttattgaccacgatgagatgttgatcctcgtagagaggctctactaaactggcatttcccatagggataattttttcagggtagtcctctgtatcaaaggtcaggctaatcttatcacctttttcaacaggactctgccaattaatagtctctccattgatgaggacgtgctttttcgtgcgtaggaaatgacgaatcttacgaggaatgaggagcttagtttcgagcaagtctttgacggttgttacaggatagggattgataatttctacgtgtaaagtcatggtttcattatatcatgaacgtttaaaagaggacagaatctgtaaaaacttggtataatagggttatgacattttttgataatctaaaaaacaaactttttaaagaagaaaatagcggaaagggcaaggattcccagcctgctgaaaaatcgaagaatttacaaaataagataaagggactctttgctaagaaacctgatgaggttgaacaagccgttgaagacttagatatgtctcaggaaagtcaagagacgtcacgttatcaacgttctaagcaaaagaaacctattgatacgacccaacctttaggtaaggttcaggcgttcttgagcaagtttacactttcgccaagaaatcctattcgtcgtttctggcgtcgttatcatattggtaaaattctctttatcttggtagctatgttggttctgacagtaggttcctaccttttctatattgccaagacgaccaatgtttcagatcttcaagatgccttgaaagcaactacggttatctatgacaaagaaggcaatcaagctggttctttgtcagggcaaaaagggacttatgtggagctggatgccattagtgatagcctggagaatgctgttattgcaactgaggaccgtaccttctatgaaaatagcggggttaacgtcaagcgattcctcttggccattgtatctatgggacgctttggtggtggctcgaccattacccaacagttggctaaaaatgccttcttgacacaagaacagacagtcactcgtaaggccaaggaattcttcctctctttggaattaaccaagaaatacagcaagcaagaaatacttaccatgtacctcaataatgcctacttcggcaatggggtttggggtgttgaagatgctagtcaaaaatacttcgggacaagtgctgccaatctaaccgttgatgaagcagcgaccctcgctggtatgcttaagggacctgaaatttacaacccaattgataatatcaaaaatgcgaccaaccgtagaaacactgtcctcgccaatatggttgatgacaagaagttgagtcaggcagatgccgacagtgcggctggagttgatatggctagtcgtctggatgatacctatcaagggactggcgatgactacaagtatccgtcttactttgatgccgtcattgaagaagctacgaaaacttatggcttgagtgaggatgaaatcgttaaaaatggctacaaaatctacacagagatggatgccaactcacaagctaacatgcagcaaacctacgaaaatacctatctcttccctacatcagaaagtgatggtagtacagctcagtcagctagtgtggcacttgatccaacaactggagctgtccgcggtctggtaggtcgtgtaggtggtaccagtgatacaaccttccgtaactttaactatgcaactcaagggaagcgtagtcctggttcaactatcaaacctttagtggtctatgcaccagctctggcttcaggatggagcatcaataaggatcttccgaataaaccaatcgactataatggctataccccaaccaactacggtggtgttgagacagaggatgtgcccatgtatcaagctttggccaactcctacaatatcccagcagtttacctctttaatcaaatcggtattcaaaaagggatcagttacggtcaaaaattcggtctcaactttgacaatgttccagaagaactgggaatttcacttggtggtggtgtgacagctagtcctcttcaaatggctcaggcttatgcgacctttgctaatggtggtgagatgaacacggcttatttcatcactaaaattgaaaatgccagtggtgacattattgctacccatagtaagaagtctaaacgtgttatcagccagtcagtagctaaccagatgacaagcatgatgcttggtaccttctcaaatggttctgctgtgaatgccaactacacaggttatactatggcaggtaagacaggtactgttcaggctgaatttaacaaggatttgactagtgaccagtgggtgattggttatactcctgatgtggttatgacgacctggatcggttttgataagactgacgagagtcactacctaacaggggctagctcgggaacagcttcgacgattttcagctacatcgctgcggatgttttgccaaatacaccaggtactgagtttaccgttgaaaatgcctatgcagctgatggtcaaacactagactatacggcagatccaaatgactcgcgcaatagcagtaacaagtcatggacagacaaggcatcagacgttgtgaatgacgttaaagatcaggcaagcagcctttgggataagattacagactccttctcaggtctattcagatagcttgtcaattgcatttaaaagtggtaagataaaaagaacggaggcgttatggcacagaaaaaagcaagcctagcgtgtgctgaatgtgggagccgaaactactcaattaatgtgagtagcactcccaaaccaacacgactagaagttaacaaattttgtaaacattgtaaaaaatacaccttgcataaggaaacaagataggagacaccgtgagacaaactggaagtattttcaaagtcttgaaagacacgacttggccagaccgtaaacaacgctggcatgattttatttcagttcttgagtatactgcgttcttcactgtcatcatctatgcgtttgatgaattgttgagtcgcgctatgtcagcactgattaactttttctaaagaaaacacaaaaagagtgggaatgcctgctcttttttgttataataaatgcagataaaagcgagaacgagggccaccaggcttttttattacgctttgaattaaaccatagacattcattgacatttaacactcgaagctagaggatagctagccgaaggtgtttaagtgtcatttagaaaaaagaaaggaatcctaaaatgctagattcattcgacaagggctggttcgtccttcaaacctattcaggatacgaaaacaaagttaaagaaaaccttttgcaacgtgcccaaacttataacatgcttgaaaatatcttgcgtgttgaaattccaactcaaacggtcaatgttgagaaaaacggtaaagttaaagaagtagaagaaaaccgcttccctggttatgttcttgttgagatggtaatgacagacgaagcatggttcgttgttcgtaatactccgaacgttactggtttcgttggttctcacggtaaccgttctaaaccaacaccacttttggaagaagaaatccgtcaaatcttgatttcaatgggtcaaaccgttgatgtctttgatactaatatcaaggttggtgacgtggttcaaatcatcgatggtgcctttatgggtcaagaaggccgtgttgtagaaattgaaaacaacaaggttaaaatcatgattaatatgtttggttcagaaacagctgctgaacttgaactttaccaaatcgctgaactttaagatagacaaaaagaggttgggctaagagacttcaaccttggaagactatctcattaaacttgaggggagaggctagaagctagatttttgaaatttagttctgtgtcactccctttttttctaacggatgatgatgaattacaaacgattttacgataggattagcgctcctttgcgttcttacgctaaggttttagaaggggtgaacaagcttataactaggactttttacctgctttttcctatatttcttttttgggtttggctaaggaatggttggtttgttctctctacgacggtgcttattatggggggaggctttttccttctttctcttggtcgtagcctctacaatcgaccgcgtccataccagacctgggctattcaaccccttattaagaaggacagtctgggcaagtcctttcctagtcggcatgttttctcagcgactgttattgctatgttggcgctgacgcttaccccctggctaggtggggttatgctttttctggcgggggctctagcttttttgcgcgtgctaggtggtgttcactatcctagtgatgttttggcaggctatgccattgggattcttgtaggtctccttctttatctttagaaaatttgggtcttcttcgagagaggaaggcttttttcgttgaaaaaggaaaggcacctctagggcacctttccttttgttctaaaattcgagttggcaattaaaggctgttcccaccattagatattagcttagtttaggacatgttctctaatagcttgagcgactccatgctcatcatttgaagccgttactaagtttgctgtttccttaaccccttcaggtgcattgcccatagcaattcctaggccagctagagctagcataggactatcgttgaagttatctccgatggtcatgacttgttcaagaggaaggtcataatatttggcaacctcaaggagagcgtgttctttagaaacatgtttggctgtgacttcaaggtagttatctttagataagtagaaggctgtctgtggaaaatccatgcttaggagtttttggtggaggtcttggataacttcagcctcatcaatcaacaatagcttgtggataggtggttctgagtctgagaccatgtcttgtagttccttaataataggagattcacccgtgatacttccttccaactgagaccatttgtctagttcgttggtaatccagtccttgccagagtagatattcacagagacacttgggtagtctgtggataagtagctaagaagttcttgaatctcagctttatccacagggtgttggatgatagtacggtctccctcaagtactaaagcgccgttgtagcaggcgatgggattgtcatgaagtcccagtttatgagcaattggttgcatccctagtggcgaacgggcagaagctaaaacaaagggaatatttgccttttcaagctctggcattacctcaatcagttgctcatccacctggtggttactagtgagaatagtgccatcaatgtcactgataatcaaacgaatattactcataatcgctatcctttccatcgtataaaatcgttactttatctttaagagtctcgaccaaatcaggatcaggtttcttatctgtaatccagtagtcaaagtcttcaattttgctcaagatatatttggagtgcttttcatatttaccagattcagcaatgagaatcttggttcgagcagcttgcatggccagttgtttgacagcaacgtcctcttcatcttcatagctaaccactccttgactgagactagccgctccaaagaaggctaagtcaaattgtagatgttgcaagagctgggcttcgtgaagcgaatagtagaagcggtttttgctgtaaaatcttcctcccaagagatgaaagtcgattccttctttgccacttaggaccaaggcgttgtccaaagagtgggagtagacagtgacgctcttagtcaatttttgtgaaatttcaagcatcagggtagagacatcgaagaagagtagagattgctctttgaccaagctaagcgctaggcctgccatttttttcttgtcttcagtgagtcctttctgacgttcttggaagccaagaacagtggtatttttaactggaagaatgccaccatgggtacgctgagccagattcctctggctgaggcagtcgaaatctcttctgacagtgtctttggaaacacctaatgcgtcaaccatttccttaacagataggtttcctcgctcctccaaaagtgttaatattttctctaatcgttgttcctgatacatgagtcaccttctttctgatactagtatagcatctttttgcttttttttaatataaaagcgcaaaaaaacttaaaaagaaagaaaaaaatgcaaatgagattcaggcgaatttgcctcttaaagttcccttatcatctttaaaaatccctcaaaaatgctataatagaagcattacgaatattggagagaaaccatgagtttttacaatcataaagaaatcgagcctaagtggcaaaaatactgggctgacaatcacacttttaagacaggaacagatgcctcaaaacctaagttttatgcgcttgacatgttcccttacccatctggagcgggtcttcacgtaggacacccagaaggttacacagcgactgatatcctcagccgtttcaaacgtgcgcaaggttacaacgtccttcacccaatgggatgggatgcctttggtttgcctgcagagcaatacgctatggatactggtaatgacccagcagaattcacggcggaaaacattgccaacttcaaacgtcaaatcaatgcgcttggattctcttacgactgggaccgtgaagtcaatactacagatccgaactactacaagtggacgcaatggattttcactaagctttacgaaaaaggtttggcttatgaagctgaagtgccagtaaactgggttgaggaactaggaacagctatcgccaacgaagaagtccttcctgatggcacttctgagcgtggaggctatccagttgtccgcaaaccaatgcgtcaatggatgcttaaaatcactgcctatgctgagcgcttgcttaatgacttggatgaccttgattggccagagtctatcaaggacatgcaacgcaactggattggtaaatcaactggtgctaacgtaactttcaaagtaaaagggactgacaaggaattcacagtctttacgacacgtccagatactctttttggtgcgaccttcactgttttggctcctgagcatgacttggtagatgccattacaacacctgaacaagctgaggctgtagctgactacaaacaccaagccagccttaaatcagacttggctcgtacagatcttgccaaggaaaaaacaggggtttggactggagcttatgcgatcaaccctgtaaacggtaaagaaatccctatctggattgcggactacgttcttgctagctacggtactggtgctgttatggctgttcctgcccacgatgagcgtgactgggaatttgctaaacaatttgaccttccaatcgtagaagtgcttgaaggtggaaacgttgaagaagctgcttacacagaagatggacttcacgtcaactcagatttcttgaatggtcttaacaaggaagaagcgattgctaaaattgtggcttggttggaagaaaaaggctttggtcaagaaaaaatcacataccgtcttcgtgactggctctttagccgtcaacgttactggggtgaaccaatcccaattattcattgggaagatggtacttcaacagctgttccagaaagtgaactcccacttgtcttgccagtaaccaaggatatccgcccttcaggtactggtgaaagcccattggctaacttgacagactggcttgaagtgactcgtgaggatggagtgaaaggtcgtcgtgaaaccaacactatgccacaatgggcgggttcaagctggtactaccttcgctatatcgatccacacaacacagagaaattggctgatgaggatctcctcaaacaatggttgccagtagatatctatgtgggtggtgcagaacacgccgtgcttcacttgctttacgctcgtttctggcacaaattcctctatgaccttggtgttgtaccgactaaagagccattccaaaaactctttaaccaaggaatgatcttgggaacaagctaccgtgaccaccgtggtgctctcgtggcaactgacaaggttgaaaaacgtgatggttctttcttccatgtggaaacaggggaagagttggagcaagcaccagccaaaatgtctaaatccctcaagaacgttgtcaacccagacgatgtggtggaacaatacggtgctgatacccttcgtgtctatgaaatgttcatgggaccacttgatgcttctattgcttggtctgaagaaggattggaaggaagccgtaaattccttgaccgtgtataccgtttgattacaagtaaagaaatcgttgcggaaaacaatggcgctcttgacaaggtttataacgaaaccgttaaatctgttactgagcaaatcgagtctatgaaattcaacacagccattgcccaactcatggtctttgtcaatgctgctaacaaggaagataaactctatgtggattacgctaaaggctttatccaattgatcgctccatttgcgcctcacttggcagaagaactctggcaaacagtggcagcaaccggtgagtctatctcttacgtggcttggccaacatgggatgaaagcaaattggttgaagacgaaatcgaaatcgtcgttcaaatcaaaggtaaagtccgtgccaaactcatggttgcgaaagacctttcacgcgaagagttgcaagaagtcgctcttgctaatgaaaaagtcaaagcagagattgatggcaaggaaattgtgaaagtgattgcggtacctaataaactcgttaatattgttgtaaaataaaaataaatcctttggagcttagctctggaggattttttgtattgctgtatgctataataattccaactaagataaaaacacagttctggttggtagtccagacgtaggcaagcctatcagtaaccttcctccttggttgtccattcttagggatagagttaaggaggtgctgtcgtggaaacaatttcaattggattgacagtttattttgaagatggattttggcatggtttgttcgaacaagtgtatcgagaatcttatcaagtttgtcgtgtgacatttggtcaggagccaaaagatgatgaaattctagagattttacagactcagtttacccaattatcttttagtccagagactacagctaagcaacatgtaaaaattaagaatcctaaacgattacagcgagctgtgaagaaacaagtaaatcagaaagtttcttccaagtcgaaagaactattgcagttgcagtacgaggaaaggaaaaagatttcaaaacatcaatctagtgtccaaaagcaattgctcaaacaagagaaatttgaacgcaaacagcaaaaacgaagagacaagcataaaggacattaatgtgtttctctttaaagaaacagctcttttctaaatagaaaggagctgttttactagtattgaagaatagattttaactgtttccaaatctagttacttatcgccaaaaggtttaccgatgatagttttaaattcaggacaatacttacttgcctcaaattcaatgacatcatattgggcaatctcattttgatagaatggatcgtgtgtaatgatttcttgaacagcttcctgatttttagctcttccatctcgccacttagactctcattttaaccacttatccctaaaagccgttttttaaacggcttttttgctagactggttctatcaaaaggaggggaaaaaatgattttacaagctaaaaacatcagtaaacgatatggaaatcatctagccgtaaacaatattcacttacagtttgaaaagggaacgtttaatgcgattctagggccaaatggggcggggaaatcaacaacgatttccatgttgattggtttgaaacaaccaacgcaaggtgaaatcatctatgaaccaggtactaagattggtgtggtcttccaaaccagtgttttagatgagatgttgacggttagggaaaatctggccattcgtgcgagacagtataaaggcttgaaacccaatcgtgtatctagtctcattggtcggctagggctatcagcttttcaaaagcagaaatatgggacgctttcaggtggccaaaagcgtcgggttgacattgcacgtgctttgctctcacaaccagatattctgttcttagatgaaccaacgacaggtctggatatccaaactcggaagtctatttgggatttgctctatcaattgcagagagaagagggaatgaccgttgtactgaccacgcattatcttgacgaagcagatgaagctgatcagatttatattgtggaccatgggaaagtaattgctcagggatcggcattggatattaagagtcagtatgcaaaaaacatcttgaagattcgtttcaaggagatagagcagatagaaagtcttaaaacttcgggaatgtcagtagagcaacaaagtcaactggagtatgtttttcaacctgagagtgaaagggaagccattgattacctggcacaagttagagatagaatagcccattttgagtttcgtccagggaccatggatgatgcctttattgcacttacaggaagggaggttcgttaatgctagccttactaaagcgaaattttttattgtacttcaggaatcgttcaggagttttcttctccttgttgggagccttgatttcctttattctctatattatttttcttcaaaaaaatctaacagatgcttgggatcagctccccaatagtggtcctttgttaaataattggttgatgagtgggacgctggctgtgacagggattacgacgagtctggctgccttgactcagttggtaaaggatcgtgaacgtcaagtagatcaggatctttatttatcggatcaaggaaagtggcggttaccattttcgtatctaacgagcgcaatcatcatctcttttttcatgcaggtccttatgtatgtgctgatgtgtggctattttagagaggtgccaaaattatccatactacccgaacttctcctcattatgctgcttagtagcctgctttctagcttagtgaatgccatttttgtttactttttccaatccgtagacagtcttggaaagtttgcgaccatagtggggacagcttctggttttttggtaggaacttatgtacctttgggcgttctacctgattttgcacaactactaatgaaatgtaccccagcaacttatattgcatcactttatcggcaagtactcatgaaagaaacattaaccgagacctttaaaggtcaagataatcttcttcaagagtttcaagaaaaaatgggcgttcagctcaagtggcaaggtttgttgacaaaggaaaatacttaccttatagtgttaggaggtattcttctagcaagtattctttggattgttttagtgaaaagaactagtcagaaaaaataagtgagagttggaataggaatgaaacttcgttttgaagaaaaatcggatatttcggcaaaggatccctgtgtggtcatccaagcagagcgattgtctgatcaagcacgagaggtaatggattatctcgaacaattttcagttgtaaatcaagtggtgattcctattaaaacggatgatcatttggttatggtaaaaattgatgacattatcctagctgagattgataagaatgtgttaacgatttataccgtaaacaatacctatacgatgagagagacactgacaaactttcagcatcgcatcaatcgtcgaagttttttacagatatcacgtcatgctgttatgaatatagaccatttggagtccctatcagatagtttttctggcaatatgatggctaaaatgacaggtggagtgaagtccagtgtcagccgaaaatatgtcaaatctttgatggattatttaggggtctaggaggaaccaatgaaacgtttaattgcttattttgtatccggcgtgagaacgggatcgttcttttaccttgcattccttttacttggtcaattatttccccagcttatctatcccaaagttaatgtaggaaatattttagccctctttatgatgagtggtttgatgggaatgctctcgtggattttggaagagcttgaccgcatatcgtataggcttagaataatcttgcatttcttgttgacggcgattgtacttacagtgacttgcctactatcaggctggtatgaggctttaacgaaccctgccatctggattattttcatttccgtttatagtattatctggctatatctcatttggcaaatgcatatgagaacacagcgtattaatcaagctttactacatcgtcgaagccagaaaaagaaagaaaagtaataaattatagtaaacttcaaaaaaatactctttttcctcttgaccctcacgccacgtcatagcctatactcttaatcagagaggagttctaatgaaatctgtaaaagaagtgagccaactatcaggtgtcagtgtgcgcacccttcattattatgacgaaattgatttgctgaaaccgtcagttgtggctgaaaatggttaccgttactataatcgcgatgcggttgtccgtttgcaggaaatattgctttaccgtgagttagactttcctctcaaaaaaattaaggaaatcgtaggtcaaccaggttatgacaaagttcaagcgcttagggatcagattaagctcttagagctgaaaaagtcccggttggaagccgtcatagctcatgccaaggccttacaaatggaggaagaagaaatgtcatttgaagcatttgatcaaaaagctgtaaaagcctttcaggaagaagctcaggctagatggggtcagacagaagcttatcaagcttttgcggctaaggaagaggagtccttccctgaagttacaaaggagatgactgcaatcatgtctacctttggacagttcaaggagtataatcctggtgatgatagtgttcaggagcaagtaaaggcgttacaagattatattagtcagcatttttatccatgtgaccaaacggtattagctggtctaggtcagatgtatcaaacagataatcgcttttctagttttatcgataaagtcggaggatcgggtactgccgcctttctcgcagaagctattcgtatttattgtcaataaactaaggccaaagtctataagactttggctcttttcatgccatagtgacatttatgtcactatttttataatcatttaatgcttataattaatgtatcgttttagaaggcgattagttaagtgtttctgctattttgcttgaaattttcttgcagataatcagatagaaattgatcaaattctaacctaaatcaaatttacggagggaatcatgtccattttaaccatcgaccacatctcaaagtactataatctcgacggtacgaaccaagagcgcgctttgaacgatgttacacttgagattgcaccaggaaagatcactgctatatacggtccatctggctgtggcaagaccagtctgcttagtattattagtggcttggatagtcagtatcaaggaaatctttatttcaaaaatcaaaacatgcgagatttttcagagcgtgacttgacctattttagaaaggctcacattggcttcgtctttcaaaatttcaatcttatccctcatcaatcagtccttgaaaatgtcaagatgcctctttatgttaaaaatatgactgataaagagatggccgagattgcggagagggagcttagccgtcttggaatcggagactttatcaagaaaaatgttaagcagctttctggtgggcaaaaacaacgtgtggccattgcccgtgccctagtcaataatccagaaatgattgtggctgatgaaccgacaggttctcttgattctcagtctcaggaaaatgttctcgaaatttttaaagagctagccgaggcaggtaaaactgtgattatcgtaacccataaccctgaagtggcggattatgcggatgttgtcattaaaatgaaggatggtgaagtcgttgaaacaatcgaaaaataaggggttgaccctcaagaacaagctcaaattgtcattgaacaactttatggaacgtaagtggcgtaatcttttgattgcgacggcaacttccattggttttatcggtgtcttgatttcctttggtttgggaaatgctattgttggtatgcttaatgatagtaccgatggtggcaacattccatcccaaattcagatcagtcttagtgctaaatcagcagccagaggggttctaaatgcggatgacgagaagtttattcgtagccagattaagagtgatgacattaagtatttggagagtccctttggaatgaacatagcaagtcttacccttgatggcaagaccatggatttcagtaaggaccttcctaactattctcaggttatcagtctttacaagaacacaaaaatctctacatctcgcaatgataaggataaaatttcagctgggaaatcttttaaatctgaagatgaaaagggcttaactcttccgatgagttttgtcaaacgctataaccaagaaacagggaagaagctcaaggctaaagactttatcggtaaagaaatttcagctcagattgttgaaaatactgctgagggaactaaagtagcggatatcaagactaagattgtccgtattgttgatgatagcgaggatgctgaagagagcaatagctatatgccagccaaacaattggaagaattgctcaaagaaaatggctttaccaaaacagtctcttacatgcttttggagctcaaggatccagccaagactaaggaagtcactaaaaaattgcagaaaaacaagaagtatctggttctttcacagcaggctattctagatgtcattattaaattcatccgtgtgatccaggccctcttgattatcctttcgtcacaagctatcctagtttcagctgtcatgattggaattatcatctatattaacatcatgcaacgctcaaaagagattggtgttatgaaggccgtcggttaccttaatcgtgacgtgaaagctatctttgtttatgaggcactttggattacgggtatctcactagctcttgctctccttgtatcgcagggtattggaagcttggccaacatgattgtttcacatctctacccaagtgtcagcaaggtgtttgacctaaatctgacctcaattctcatcatgtttggcttctcactcttgatgggctatgtgtcagcctaccttccagcccgtaaaatcagtaaaatggaccctgtcgagtctctaaggtatgaatagaaataaagagtagtctcctcaggctactcttttttgtcaaaacaagcattagaaaaatctgaaaatccaaacaataattaactttctgaaaagtggagacaattgctcaaaaatgctataatagtcagcatatacaggctattaataacaaaaaaagaagtacctattcgattggaggagttccatgtataaagatgatagtttaaccttgcacactgacttgtatcaaatcaatatgatgcaggtttactttaaccaaggtattcacaataaaaaggccgtttttgaagtttatttccgtcaacttccgtttaaaaatggctttgctgtattcgcaggtctggagcgtattgtcaactatcttgaaaatctgacgttttcagaaaccgatattgcctatttgaaggaccttggctaccctgctgattttctagattacctagctaatttaaaacttgaattaaccatcaattcgtcacttgagggagatttagtgttcgctaatgaaccgattttccaagtggaaggtcccttggctcagtgtcaactcgtagagactgctttgcttaacattatcaactatcagacgctgattgcgaccaaggcagctcgaatccgatcagtaattggcgatgcccctcttttagagtttggaacacgtcgtgcacaagagatggatgcagcaatttggggtacccgtgcagctgtgattggtggtgcggatgcgacatcaaatgttcgtgccggtaagattttcggcattccagtttctggtactcacgctcatgctcttgttcaggcctatggcaatgattacgatgccttcaaagcctatgcatctactcataaggactgtgtattccttgtagatacctatgacacccttaagattggtgttccgaatgctatccgtgtcgctaaagagctaggtgataagattaatttcttgggtgttcgtcttgattcaggtgacttggcttatctatcgaagcaggtccgtaagcaactggatgcagctggtttccctgatgccaagatttacgcttcaaacgaccttgatgaaaatactatcctcaacttgaagatgcaaaaggccaagattgatgtctggggagtaggtactaagcttatcactgcctatgaccaaccagccttgggtgctgtctacaagattgtttcaatcgaggatgatcagggagtcatgcatgatactatcaaattgtccaataatgctgagaaggtttcgacaccaggtaagaagcaagtttggcgtattacgagtcgtgctaagggcaaatcagaaggtgactatatcactttcgcagatacggatgttaatgctttagatgaaattaatatgttccacccaacatatacctatatcaataagactgttcgtgattttgatgcagtgccactcttggttccaatctacgacaagggtcaactgatctatgacttaccaagtcttaatgaaatcaaggcatatgcgactaaggaattggacgaactttggaatgagtataagcgcgtgcttaaccctcaagattatccagttgacttggctaaagatgtctgggataacaagatgaccttgattgataatgtccgtaagaaagcccatgacctgtcagagtaaaaggagaaattatgactttgcaagaaactattattgctcaactaggcgttaaacctagcattgatccaaaggaagaaattcgaaaatccattgattttttgaaggcctacatgctcaaacatccattccttaaaacatatgttttggggatttcaggaggtcaggattctacattggctggtcgtctggcacaacttgcgattgaagagctccgtgcagagacaggaaaagactatcagtttatcgccattcgtttaccatatggtgtccaagcagatgaagatgatgcccaacatgctcttgcttttataaagccagatgtgagtcttgcggttaatatcaaagaagctgtagatggtcaggttgctgaacttgccaaggcaggtgtcattgtttctgacttcaacaagggaaatatcaaggcccgtcaacgtatgattacccaatatgcggttgctggtgaaaatagtggagcagttatcgggacagaccacgccgctgaaaaccttacaggctttttcacaaaatttggtgatggtggtgcagatatcttgccactctttcgtctaaacaagcgtcaaggtgcagcccttcttgcagaacttggtgctgacaaggccctatatgaaaaagtgccaacagctgacttggaagaggataaaccaggaattgctgatgaagtagcacttggcgtgacctatcgtgaaattgatgactaccttgaaggtaaggaagtctcagccaaagctcaggaaacgattgagtcatggtggcataaaggtcaacacaaacgtcacttgccaatcaccatttttgatgatttttggaaataagaggagaaatgagttatgatcaaagcttatattgatttttggaaacgtgcctttgactttagcggacgttcgaatcgtccagactactggtgggcttacttggttaatgtcattattattactattcttactgttttttgtgttcttattcctttcttcagtaatgttgatcttagtgacccagctctgttgaataatccgactgaactgcaaaaaataattattacctatgcttggccactaatgctttttagcttaattgaacttatccctcaattgtctctacaaatacgtcgtttgagagatgcaggatttcatccggcttgggtacttctaagttatatagggcttgtaccaatcttggctatcttctcattgattggaagcattgtcctccttatcatgtcgtgtcagccaacgaaaccagcacctgaaacgcagtttgataaagtggaataagattgtcataaccctaggttttacctagggttatttttaaattgaattttcagaaattagtgataaaatagagaggaataaggcttaaaggaggaatcttatgacttcactatcaacagatttcacagataaactatttgcagactatgaggccaatgccaagtacagtgctatcgaaaatgctgtaactcacaatggcttgctcaaatccatcgaaacacgtcaatcagaagttgagaatgaccatgttttctcaatcgatttgactaaagatgaggtgtctaaccaaaaggcttcaggacgttgctggatgtttgcggcactaaatactttccgtcataaattaatctcagactttaaattggaaagtttcgagctttctcaagcccacaccttcttctgggacaaatatgaaaaatcgaactggttcttggaacaaatcattgctacagcagatcaagagattggcagtcgtaaggttaaattccttttggataccccacaacaagatggtggacaatgggatatggtcgtatcactttttgaaaaatatggtgttgtgccaaaatcagtttatccagaatctgtagcttcaagcaatagtcgtgagcttaatcaatacctcaataagcttcttcgtcaagatgctcaaatcttgcgtgatttgattgctggtggtgctgatcaagctgctgttcaagctaagaaggaagagcttcttcaagaaattttcaattatcttgccatgactcttggtttaccaccacgtcagtttgattttgcctaccgagataaagatgacaactatcaatctgagaaaaatatcacaccacaagctttctttgaaaaatatgtgggtcttaaacttagtgattatgtgtcagttatcaacgctccaacagctgataaaccttacggaaaatcttatactgttgagatgttgggtaatgttgtaggtgcgccaagtgtgcgttatattaacctcccaatggatcgtttcaaagagcttgccattgcacagatgaaggctggagaaactgtttggtttggttcagatgttggtcaagtctcagaccgccaaaaaggtattcttgcaactaatgtttacgattttacagctagcatggatattaacttgactcaagacaaggcaggacgtttggactacagtgaatctctcatgactcatgccatggtattgactggggttgatttggatgctgatggcaaaccagttaaatggaaggttgaaaattcttggggagacaaggttgggcaaaaaggttactttgtcgcttctgatgcctggatggatgaatatacttatcaaatcgttgtccgtaaagacttccttacagctgaagaattagcagcctatgaagcagagccacaagtacttgctccttgggatccaatgggagcccttgcttcaaaataagacaatatatgaaaccactgggaaatgattccagtggtttttcatagcttctttaaaatttatcggtaaaaaaagagttatccattcggataaccctttttatttcttattcttctgctgtggcagtgtttgaatttgaatgttcagagccattagaggccgatgtcgatggatttgttgaagcatcaggcccgtactgttgactatcttgtgaacttgatgagtcactgctttggcttgagtcccaacttgatgatgagctagatgttccaagtgatccagagtaaacatttgatgttgaagaaccagtaaggaagacatagctaccattattataaacaccgctaggcatatcgaaatcttcagaacctgcaccatacatctggttaaggtagctacttgttacaccatagatttgtttagcgatatcaaggtctgaaccataaagtggtgttttacggtttttgtaacctgtccaaatcgccattgcatacttagtattgtaaccaacgaaagtttcatccggaaccataaggtcagcatagacaccactttctttttgtactttatagtactcatcgtcaccgtagttagatgtaccagtcttaccagcattgattgtaccaggaacataagcttcagttgctgtaccacctgtcaatacttgtttcaacatacttgacatcatgtaggctgtttgtggtgacatggcttcgacacctttagaatcaaatgatttagttgaaccgtcttcaaacttgattgatttaatgtaagatggtttatagtaagtaccaccatttgcaaaggctgcataagctgcggccatcttctcacttgatgcaccatacttagaatctgatgatgatgttgaagatgagatggcatttgagtagtacatttctggatactcgatacccaaatctttcaagaaggattgtgcatattccaaaccagcagcttggagagctttaacggctgtaacgttacgtgactgttgaagcgcataagtcaatgaaatgcttccgtaatacttacggtcccagttgtaaactggtgttgaagaacctgggaaattgtaaggattatcgtaaacagtcgtaccagtgtttgtataaacacctttttcaatagcaggagcatagtcagtgattggtttcattgtagaaccccagtcacggtctgtttgaacagcttggttggtaccaagtgcaacgttttcgtcttggtgacgtgatcccaattgggcaacgacacgaccattagtaacatcaataatagtagaagcaacttggagactatcgtttggatagtatacgtagtcgttagtattatagacgttccagatatatttttgaatatctgggttaaggttagtgtagacatcgagacctgctgagtagatatcagcattggcatcagtagatacttgttcaataacttgtttgatgtagttatctaagtatagctcatagctagctttcttcgtaagtggaagaagtccatctgatacatcagttgctttagcttgttcgtactcttctttagaaatgtttttgtcttcatacatttcactaagaacagtgttacgacgctctttggcagcatctggattagcataagggtcatattgtgttggtgcttgtggaataccagcaagaagagctgcttgggcaacagagaggtcgctcaagtccttaccaaagtaagatttggctgcagtcttcataccgtagtaaccattacccatataaaccttattaatatagaaggtcaagatttcttgtttagtgaattgacgctccatttggagtgacaaccagatttcttgtgacttacgtttaagggtttggtcagaagtgttagttgagaagtaagccaacttaatcaactgttggtcgagtgtagaccccccttgggtactgctacgacgaaggttattaacagctgcccccatgatacggtagacgtcaatcccacggtgtgtgaagaaacgtttatcctcgatagaggtgatggcattaactagagttgttggaatttcatctgttgatgcactctcacgcttctcagctcccaagtcggcaataagactaccgttagcatcgtaaatcttacttgagtttgttgattgcagtttgttctcggtaagtttaggaacactgctaacatagtaggcaaagaggctaccaccagcgatgacacagactacaaagaaagtgagcagtccaataaatccgtattttgcaatacgccagcccaaactttggtctgaagcggcagagcgttttcctttgctatagcgagaagaatctgaacgcttgaccttgatgtttttagcacgtttagtcaaaccgttaagtgattctttaaagttgctgaaattaaatttagccattatgtgttaccacctaataatttttcaatgatttctaaataaggaacttgaggataagctgcttctgtaattgcatagcctctttttttgatataatcaagaggcattgatttcgtccctttatcaatttgataaaaagcgattaagtctttggcaggcagaaggtaggtttccttaagcgtcgagaagtgaagtagcacgaagcagatcccatcttgactgatgacctgagacatgtgctcaatttgatgcgcatgaaagtttttcataggcatggatgtcttttgtcgtgtctctttggcttcaaaatcaatgtagtatcctttgtaaacaccagagtagtcggtagtagaggcttgtctaaagtaagcttctacaatctttgctcgtgagcgtttgggataatcgactttgacaatttgaacaggagtgggttttttatgaataacggctaaaccacgcgacaaatagtaatcattagtcgcgttaatagcagattcaaagctcataccccgattggcaaagtcaactctatttgattttttaggacgtacttgtgctatcttacgagatatctgatggggatagtttaccatttctttcccttcttctttataagatatgcataaagactattttattataccataaaatgaacgaggaaaacaataaatgacatcactactggtaactggttataagagctttgaactcggtatttttaaagacaaggaccctaaagtaaccattatcaagaaagcaattaaacgtgattttaagcgtttcttggatgatggtgtggattggatgatttttaccggcaacctcggttttgaattttgggcactagaggtggccaaagaacttcagaaagactatcctttgaggttagcgacgctctttccttttgaaacgcatggtcagaattggaatgaagcgaatcaaacaaaactggcagcctttaagcaggttgattttgtcaagtatagctttcccgcttaccaatctccagcccagtttaaacaatttaatcagtttctcattgacaatacagatcaggcttatttattttatgaacctgaaaatgaaacaaatctgaaatatttttacggtatgatgatagaagcaagggattatcccgtatttcgactgacttttgatgacctcaatgaggtcatgtcggaataggatataattgagttttaaacttgcatttttatatttttttctgtatcataaaaatattagacagtaaagtattagtaagttagataagacaagtattggagaataaaaatggctaagattaatttaacgcccaagaaaatctacgaacaagaatttaaaacaagcatgcgtggctacgataaaaaagaagttgatgagtttttagatgatgtaatcaaagattacggtgtctatattgctctagttaaggaattgcaagaagaaaatgcaaaacttaaggctaaagcttcatcagctcctgcaagtcgcccagcatacgcaagtgcgacaagtgagccatcacgtgcgaatgccaatgttgcttcggcttcaaactatgatatcttaaaacgtgtcagtcgtttggaaaaagaggtctttggaaaacaaatcgtcgaataaaactggtttgtgcaatttttggataatcgcatggttgcttgtcttccatgaggaaagtccatgctagcactggctgtgatgccagtagtgtttgtgctaggtgaattaataagcctagggacttgattttcaagttacggcgagtgaactggctaagtcttcggataggttttagtagctctgaaagtgccacagtgacggagtttttagggaaacctaaaaagtggaacgcggtaaacccctcaagctagcaacccaaactttggtaggggcatgggatggctggaaacgaacggaccatcctgactgctttgcagtagacagatgattatcgaaggaagtggtacctagtcacttctggaacaaaacatggcttatagaaaattgcatataggtgaggctgggacacatgtctcagccttcttttagcaggaattctctcttttacaactatatcttctaaagaagagagtggaaaaataagccatcagttaaaaaagtttgtactcttaacaatgagataaaaggatgacaatgaaagaaacatttacattagtagcaactgctgcagcaggtcttgaggctgtggttggacgtgaattgcgtgagttaggttatgacactcaggttgaaaatggtaaggtgcgtttccaaggcgatgttcgtgcaatagctgaaactaacctttggttgagagcagcagaccgtatcaagattgtagtgggtgaatttccagcacgtacctttgaggaactctttcagggagtttttgccttagactgggaaaattatcttccgctaggtgcaaagttcccaattgctaaggctaaatgtgttaaatcaaagcttcataatgagccatctgttcaggcaatttccaaaaaagctgtcgtgaagaaattgcagaagtatttccaccgtccagaaggagtgcctcttcaagaaacaggagcggaatttaagattgaagtttctattttaaaggataaggctaccgttttgattgataccacaggtgctagtctctttaagcgtggctaccgtactgataaaggtggggcaccgattaaagaaaatatggcggctgctattcttgaacttagtaactggtatccggataaaccgttgattgacccaacttgtggttcagggaccttctgtattgaggctgcaatgattggtatgaatattgcgccaggatttaatcgtgattttgcctttgaagcatggaattgggtggataaagatttagtacagttggtacgtgatgaagcagatagcaaggcgaattatgatattgaattagatattatgggttgtgatattgatggccgtatggttgagattgcaaaagccaatgctcgtgaggcaggtcttgaagatgttattaaattgaaacaaatgcgtttacaggacctgaaaacagataaaatcaatggtgtcattatttcaaaccctccttatggtgagcgtttgttggatgacaaggctgtggatatcttgtataatgaaatgggtcaaacttttgcgccacttaaaacttggagcaagtttatcttgaccagcgatgaacaatttgaaagcaaatacggtatgaaagccgataaaaaacgtaagctttataacgggacactccgtgttgatttgtatcaatattttggtgagcgtgttcgccgttctgaggctagaaaggtaaattaaacgtgtcagaagataaaacacaaaatggctatgaaggtagccaagagctagatttccaagatgccaaggaaatgacagtcggtgaggctgtccgcaaagaagctgagattaatgctggtgtaacagaaacagatagcattttggataagtatatcaagcaacatcgcgaagaagttgcctcacaaaaattttcaaagaaaattgaagctgatggcgacacatcacctttggatgcttttattcaaaagcaacgtcaggagtttgcggattcaggtttgattggtcaatcaatggctaatgagtcaatcaactcaacaacagctactgaagaagtaacaccggtcacatttggttttggtgctacagataacaaggttgatgaaactcaatctcatattgacaagcagttgccaaatgctcctgttgaacctgaggttattgcagaaccagaaagtcaaagttctgaagttatcattacgtcaacgaatgctaatcgtttcatcacgtcagaaacagaaaaatttgaccttggtgatgcacttgcagattcagctacttcaactaatcagccaacgccagcctataacgatgcattggtagataatattgatgataacaatcctttgattgctaacatcgatgatccagaaccacaaaatcctgttgttgccaatattgacgatactgagccgcaagcttcaaaaccattgttggatgatgttgttatctcagacactatcgatttggcggctattgcctcaacagtggcaggggtaactggagcaaaagctgacgaagaaaagacaacaccaaaagtgtctatggcagttaatcgcccatctgcagaagacagaatctcttcagagtctatttcaccatcgcataagagtgcctttgatggtgatattccagtttaccgtcgtaaaggtgttgttatcggtgctctagcagttcttgctttagctattattggtggtagctatgctctttataaaggaacacatagccaatcagcaaaaccaacaagcacagcttcttcagcagtgacatcatcatcaagcaaggacacggcagctgctgataataaggccttcgaagaaatgtataagaatttcttcacagatgacgagcaaacaaaactcgctaatgatcaatttggtaagctatcagatttggaaaaactgctcaagaaattggagaaaaccaagtattatgatgcagctaagaaaaaatatgataacttgaagaaacaaattgaagctgtacaaaagattaacagtcagtttgagtcagatgctctggtagatggtagctataatgcctctatcgctgttaaatccgatgccaactttaatagtctgccagaaagtgtaacaacaactggaaatgcgagtcttgatagcactatccaagaagcgattaagggtggtaagactcagcttgaagaaaaagctaaggctgcgagcgcaacatctgcagcgacagctgctgatagcgccaatactgctagtcctgctgcaccttcaggtgataacacgtctggagcagcttctactggtggtggtgcggccgcatcaaatacttctggagcgcaaaatggatcagctaactcaggtgcaactggttcaactggtgcgactggaggaactactggtggctcagctgcagcttcaacagttgtaacacgcggaatcacaaattataacccatcaatccttcaacgtgaccgctcacgtgtgccttataatgcaaatgtagtagcagatacaagtaacccagcttggacttgggctgatggtgttcttgataagattattgaaacatcacactcacgtggttacttctcaggagataacttcatccttgaaccagttaacatcatcaatggtaatggttactacaacttgtaccttccagatggaacttacctcttcagtatcaactgtaagacaggttactatgttggtaatggttcaggtcactcagataaacttgattattaataataatctgcgacactccctagggagtgttttttgttttatcttggtgaaggcctagtttataaggattttgtgctataatagagggataagataggggtgaatactatggcaaaattgatgccgggtagagtccgtaatgagggtattgaactttttgaaaaggatctcattaccattcatcaggtctcagaaactcagttggatacaacagttgaccaacatcatttaatttatgcactcaatgattctgaaatcacgtgtgactgtgattatttcgctcaaaaaggctattgtccccatttggcagcggttgagtattatctaaaaaatgataaagaaggccagcgtctcttggcagaactggaagaggaacaagaatcctctcaaggccaagagcgaggtcactcttttggtggtttatttttagaagggctttccctgaatgaagatgataccgttagatatagcttgatggtagagggagaggaatctacctttggttcagagatttggtggagtatacgtttacgtcgcttaccagatgaacgttcttatgttattcgagatattcctgccttcctcaaacttgtagaggctgaaggttattatcagataggtaagaactactatgaacccctaacacttattcaatttgaccaggcttcacaggcatttttagacttcctaggacggatgattccagatgaagccaagactaatttagactttattttaccgaataatgcacgtcacctttgtctcccttacggtttttttgaggaaggtttgagacggatgcaagatttggatggctttaggtttgaatgggaaggagccgaatatcgccaacttttggtcgaggatttgattgctgatgctcagctcttctcgtttgatatttgtgtcgagcccaagatgattgaattgactgtcgctgagaagaatagtcaggccttttttaataatcgtattctcttttatcaaggtgttttttatcgtctgaatcgaaaacaacaaaaacttttggttggcttacgctctcttccaatcggaagcgatttgaataagcacgtcagctttaatctcgatgaacaagccatcttggctgctagtctttttgattttaggactatggggccagttaaggcaccaaaagcttttaatatcaaggatttcacaccgagatttcgctttgatctgaaaggtgatagtgagattattcttacattagcctttgattttgatggtttcttggtacatgatcgccaagagttgagtcatttaggatttaccagtaactatcgtcatgagcaggctgtttttcgtttgatgtctaagcatggattcacccctgattttcagtcatctaaacgattaattagcagtcaagagctctatgatttctttacaaatactctaccagattttgaaaatgcaggaacagttctgattggacaggagttacgtgacttacgggttgagcagagtccacaggttcaggtagagcgtcagggaaatttattagatatttcctttgatttttcaagtcttgacgacgaagatgtggatcatgctttagcagccttgatggaaagctcgccctattttatcaatcgtagtggtcagttgattgtttttgatgaagcgacgcatcgtattagtgagagtctcaaaactctgagagctcgttactcaggaaaaggtcacctagaactcaatcaattaactgcctatcaattgatggatgctctttcagaaagtgattctgttcgtttttcaaaagatttccaactcttaacgcaacatttgagtaagccagagacctttgatttgccaacctataaggtagaagctggccttcgtccctaccaggaaaaaggtgttcagtggctatcgatgttgcatcactatggttttggcggtatcttggccgacgatatggggttggggaaaaccttgcaaactattgcctacctctctgcacatttagaagaaggacaacgagttttggttttgtcaccatcaagtctgatttacaattggcaggatgagtttaaaaagtttgcccctcagttagatgtagcggtttcttatggactcaagccaaaacgtgatgacatcattgccgaagaccaccagattatcattacaagctacgcttccttccgtcaggattttgatgcctacaaggctggtaaatatgactatctcattctcgatgaagctcaggtcatgaagaatacacagacaaagattgcccaatatctacgtgatttttctgttccacattgcttagcactatctggaacgcctattgaaaatcatttgttggagatttggtctattttccagattattctaccaggacttttaccagctaagaaaacgtttcttaagttaacacctaaggaagtggctaggtatatttccccctttattctaagacgtaaaaaagaggaggtccttcctgatctcccagatttgattgaaatcactcaccaaagtgaattgtcagatgctcaaaaggctatctatttagcacaattgcaacagatgcaacaaggattaattttggcaagtgatcaggaaatcaaccgtcgtaaggtggaaatcttgtcaggaattacccgcttacgacaaatctgtgataccccagctctctttatggactatgcgggagatagcggaaaattagatagccttagagagttgcttagccaaattaaggaatcagaccatcgtgtccttatcttctcacaatttcgtggaatgttagatattacagaggggctcttacaagaattagggatttcctcatataagctaacagggtcaacgccatctgatagtcgtcaagagatgaccagagccttcaatcaaggaagtcgagatgcctttttgatttctctgaaagcaggaggagtgggactgaatctaactggtgctgatacggtaattctgattgacctttggtggaatccagcggtagaaatgcaggctattagtcgtgctcaccgtataggtcaggaacaaaatgtcgaagtttaccgtttgattacaagagggactatcgaagagaaaattcttgagcttcaagaaggcaagaaaaacctggtaacaaccgtcttggatggcaatgaaagccgtgccagcatgaccgttgaggatattaaagaaattcttggtattgcaatatcttaatttgttatatttaatattggaatactaaaatataaaaatgctactaggcaaatcttttgaattaggctataataggatattgcaagacgtatctccccattcccgattatttatattaagatacgcatcatctcgaaaatgaaaggaagtcttttatgcatcgccaaagacgacaatttccgctgattccagacggggaaccttgcttgcaagaaccggtctctatgcgcctatacgaaaatgaagatttaatcacaaatatccgtggcccttaccaagataaggactacaatgatttgttgccgaactatgatttcttgtcagctaagcctagcaatcgtaagcaggctccaaaacgagtggagacacaagaagctggcatgacttatgctgaggaagcccgcgaaaaggctaagcgtgatgtacgtgagaaacgccaaaaattcctccgccaagaagttcaacaaaccaaacatactaatagccgtcaactgactgctaagcctaaggtagaagctaaaccaagctttgaggccactgttgagccagctgctgtaacaacggataaaggaccagtgacagcctctatcttgggagctcctgtaagtgctatcaagcgaactttagcacctaatgggaagcactcaaagatccatcacttggcaaatcgtctgcaacaagattcttacatcttggcagaagtggctccaacctatcaacagcctagtaacccatctcgtaagaacgtcaagaaaaatagctatgacttcttgaaacgtagccaggtttataattacccagaacgtcaaacttaccgtgaacaccgagttgctcaagaattaaatttgacgcatttagaagacgcaaactaatcgcagtgcgattgtaaggagaaactatgtcaaaaacttatcattttattggaattaaaggatctggtatgtcagctttggctttgatgctccaccaaatgggacacaaggttcaaggttcagatgtggaaaaatattacttcactcaacgtggtcttgagcaagcaggtatccctattcttcccttcgatgaaaaaaacatcacagaagatgttgaattgattgctggaaatgcctttcgtgaagataataacgttgaagttgcttatgcgattaaaaatggctacagctttaagcgttaccacgagttcttgggtcacttcatggatcaattcactagctttggtgtggcaggtgcacatggtaagacttctacaacaggtctcttgtcacatgttatgaaaaatatcacagacacgtcatatcttattggtgacggaactggacgaggttctgctaatgcgcaatactttgtctttgagtctgatgaatatgaacgtcatttcatgccataccacccagcatactcaatcatcactaacattgactttgaccatcctgattactttacaagtatcgatgatgtgttctctgcctttgatgattatgctaagcaagtgcaaaaaggactctttgtttacggtgaggatccacaccttcgtaagattacagccaatgcgccaatctattactatggtttcgaagaaaatgatgactttatagcaacagacattgtgcgtacaacgacagggtctaatttcaaggtgaaacatgatggacaaatccttggagaattccatgtgccagcctatggtcgtcacaatatcttgaatgcaactgcggttattgggaacctctatgtagctggttttgacatggacttggttgcggaacaccttaaaactttctcaggtgttaaacgccgtttcacagagaaaattatcagtggtactgttgtcatcgatgactttgcccaccatccaactgaaattattgcaacgcttgatgcagcacgtcaaaagtacccatctaaagagattgttgctattttccaaccacataccttcacacgtaccatcgcccttcttgatgaatttgctgaagctttgagtgaagcagatgctgtttatttggcgcaaatttacggttcagcgcgtgaggttgaccatggtgatgttaaggttgaagatcttgctgctaagatcaataaacctgccaaagtggttacagttgaaaatgtctcacctctccttgaccatgacaatgctgtttatgtctttatgggagctggggacatccaactttacgaacgctcgttcgaagagctcctagcaagcttgcaaacacacatgtaatatattaagggctgtagcgatttcgctcagctctttctcttaatagaaaggaatttgatatgcttattcgacatgcccgagaggatgattgggctgatgttgttcgtatcgaacaagaaaatttttcgcctgaagaggctgcaactccagaggctattgcagagcgtttagagacgatttgtgatacctttctaattgctgaaattgatggcgttgtagctggttacatcgaaggaccagtgattgcggaacgttatctcacagatgacctgttccataaagtggctcctaatgctagtcaaggaggttttattgcagtgactagtttgtctatctccaaagactttaaagggcaaggtattggaacagccttgattgcagcgcttaaagatctggctattgctcaaaaacgccaaggtattagtttgacttgtcatgattacttgattgcttactatgagatcaatggtttcactgatgagggagaatcggaatcaaatcatggtggaagctcttggtataatatggtctgggagaacccagaaacccattgatttcagtgttacgttactgtgacaaaggaccaattgatttgcattaactgactttttaagatataatggcgtttgttactatagaggaggtatgccttgacggacaagtttaatgaacactcggaagcttctgaagatagcctaagcttcaaagatcagattctccgagacttacaagaagcgacacggctccgttctcttcgtgaggaggagcataataaaagtgcaactatgcccgagacaccactttcaacgtcagctgagagcgctacaactcgtagtgattcagtgtctaataaagtaagtaaccaagattttagttcacattctgtttctcacagtgcctttgctaaatctatgacttctgagacagcccgagattctcaacaagatagtcttagcttgttttcagattctcaagcggagtctttagtatctgatgctcattcaaacctagcgtctattcctaaagagccaattgaggaggagaaaaaggtaaatattcctcaggagactgaaacgtcgaaacgtcgttttaaacgtccagtttgggaaactagccttaacgaagcatctgaagaggagtatattcctgcagatgttgccaaggagctcattgaagctaagtctaacgaagctatttatacagaccctaaagaattggaggccaaattgacctcagaacgtcaaaaagaagcattcttgcaggaacatcatgcaacaagtgaccaagcgtcgcaagaaaaggttcaatcagagctagtagctgatggtaatgaggatgatgagagtatttctctagaaccctctggaaaacctaagaaaaagaaaggcaagaaagtgaagaagaaaaagtcttcgccaaaagatggtaaacaggctgacattgtcgacgaagagccgatttcacgttctaaccgaaatcacaaacgcaataaaaataaccgtcgtgctggtaaaattgcaagaaacattatcatcttcttgctacttatcttgtcagtagctacattctttggttatcgctatgttagtgatgctgttggcgcaaaagatgttaattcaactaagtttgttagtgttgaaattcctgaaaattcaggtagcagttatatcggccaactcttggaatcagctggtgttattaagtctggtaaggtctttaattactataccaagtttaaaaacatctcaaatctgaaaagtggttactacaaccttcaggctagcatgaccatggatgaaattattgaggcacttcagaaaaaaggtagtgataaacctcaggagccatctcttggtacggtcttagtcaaagaaggatataccatcgatcaaattgccaaggcagttgaggttaattcgtcagctaaaaaaggcaaaaaaacatcaactggacttaaggcgaaagatttcttgaaattgatgaaggatgatgctttcattactaagatgaaagcgaagtacccaaccttgttggcaaaccttccaaatgctacggatgctaagtatgtcctagagggttatctgttcccagcaacttataacattcatgatgatacgacggtggagtctttggcagaggaaatgttgtcaacgatggatacctacctatcaccttactatgcgacgatttcatctagtggacacaatgttaatgagattttgaccctagcttctcttgttgaaaaagaaggagctacagatgacgaccgtaaaaatattgcgagcgtcttctataatcgtctaaactcagacatggctctacaaagtaatatcgcagttctttatgctcttggaaaacttggtcaggaaacgaccttgaaagaagatgcaactattgacacaaacattgactccccttataatgattatgttcataaggggttgatgccaggtcctgtggacagtcctagtctgtctgcgattgaagcggttatcaatccatcatctaccaagtacatgtactttgtggcagatgtaaccactggtaatgtctattttgctgaaagctatgaagagcatcagcataacgttgaaacttacattaacagcaaactaaaagataaatagtctgattggctagttaaaatcaagcaaacgaatagtgattctaacgatacagccaacggctcaaaaaatagaaaagagaaaaaaatggcagaaaaaacatatgtaatgacacaagcagagaaagaacaacttgaagcggaattggaggagtacaaactcgtccgtcgtccagaagttgtagaacgtattaagattgcacgttcttatggtgacctttcagaaaactctgagtatgaagcagccaaagacgagcaagcctttgttgaaggacaaattcaaattcttgaaacaaaaattcgttatgcagaaatcgttgatagtgatgctgttgctaatgacgaggttgcaattggtaaaactgttgttgttcaagaagttggtacaaacgacaaagatacttatcatatcgttggtgcagccggtgctgacatcttttcaggtaagatttcaaatgaaagcccaattgctcaagccttgattggtaagaaagttggcgacaaagtcgctatcgaatcaccagcaggtagctactctgtagaaatccttagtgtagaaaaaacagcctaagtgactgttggcattaaggtgtccaatatttgaaactagtgggagtgcgacaaaacagttgttctgtcgcactccctttttggttgccggcgctattaggagttaggctagtctgaattaatctataagaaaagcactcttggtatttgccaagagtgctttgtagcttatttacgattttgcttaccggcgttacggtttttctttggtttacttgcaattgcttgagtattttttggtgttacatctttacgcttgattggtgtagtacgaggtgcttttggagggttctttttgaactcttcagcaactttttctttcaagcgaggtttgatgatgtagttggtaatcaactgttggataatagagaagataccaccaacgaaccagtagaggattacggctgcaggtgagctgataccaaagaaaatcatcatgatcggcatactgtacatcgtcgctgccatttgtttacgttgctcttcaggaacttgttgaatagacaaccaagattggaagtagtaaagagctgcgatgatgataatcaatgggaagtcacggtgaccaaggttaaaccagaggaagttatcttgaagtacaccaggagtgtaacgtgctgcgtagtagagtgctgagaagaatgggaactgaattaatagaggaagacagccgacaccacccatcaagcttagaccgttttcacgctgagcttgcatgagttcagactgggcagccattttttcttcttgagtttcagcgttacgcaaacgttcgttgattggttccaagataggcgcaaggtattcacgttttgctgattggtaggctgcgctacgagattggtgaagaccaagtggcaagataatcaaacgaacaatgatggtaacaaagataataccaagaccaaagccgagaccaagattatctgcgaagtaggtgatgacgtggctcatagggcgaccaaggaggttccagacccaaccagtaggattaccagacttatcaaggctcacacatcctgataggaagagtagcatgctggcagcaagccccatcagggctagacgtttttgatttttattcacaatatcattccttttgttttttagttatacttgtctattttacctttttttaaggaagagaacaagctaaaaacggtggcttcctcttaattagccatccgaaaatcgctgtaatttgagaagtttgccatggtcacatcgacataggttactttagaccattttgaaggtccttttcgaacttcttgaataaatttagctaacttagcaggattttctgactgagctaggatttcaacagttccgtcgtcattattccaaacccgaccgtatatatctccaatatctagtgctagagcataggttgaataacgaaaaccaacaccttggactcttcctgagactaataatcttactttttgcatggtccacgacctccttttgaaagctctttcctttagtataatccttgctataaagtcggtcaagtccaagatttatcaaggaatttctgctataatgagtgtatggaaatcattcaatcaaagcaaaatgctagcattaaatctgctagaaaattattgcagcgcaagcaccgtaaaactagctatcttttagaaggatggcatctttttgaggaagcaaaggcaagtggtgccgatattcttcaagttttcgtgcttgaggaaatggctaatcgtgtggctaatatggataaggtgaagttggttagtccagaggtgctcaaggagctctgtgaaacccagaccccccaagggattgtggcagaagttgctaaacaatctcaagccttgccagaatctctctcagggaagtatcttctcttggaggatgttcaggatcctggcaatgtaggaacaatgattcgcacagcggatgccgcaggttatgacggagtctttttgtcagataaatcagctgatatttataatcagaagaccttgcgttctatgcagggaagtcatttccatcttccaatctatcgtggacctattcttgacatggttgaggcttgcaaaatgcaaggggtacctgttttggcaacgactctctcagatatttctgttgactataaagcagttaagacagatggcaattttgccttagtgatgggaaatgaaggtcagggaattagtcaggaaatggctgagtctgctgatcaactcgtacatattagcatgccaggtcaggcggagagtttgaatgttgctgttgcagcaggaattctcatgtttagtctctaggtctcaaggatgattttaggagaaaacaactgacttttaaagtaattttaagcactagtggtataatgaagaagcattagaaacattaatgaggtattattatgaaacgaccagaagatgataaagaattcatggaagttgtgggacatttgatttcacacccacgttttcaaaaattggatgggattgtacagcaccatcattcgacacgtttagaacactcggttaatgttagttacaccagctataagattgctaaaaaatttggctgggatgccaagagtactgctcgaggcggtctcttacatgattttttctattatgattggcgagtgactaaatttaataagagtcatgcttgggtacacccacgtattgctgttcgtaatgccagaaagcttgtaaatctaaacaaaaaagaagaggatattatcctcaagcatatgtggggagcaacgattgcaccgccgaagtataaggaatcttatattgttacgatggtggataagtattgggcggttaaagaagcggcgacacccttacgaaaccgaattaaaaatcgtaagtttttccgtcgtaagaccctacaaagccaccaccaataattcattatttttaggagataactatggaatcaaatgcaatttatacgactagtgatgcgggcttaagccgctttttcggaaagatttatggccttgtcggtataggagtgggactttcagcagtcatttcttatctgatgctctttcctctctcacatgtttttgtcaatattctcatgaattattcttgggtttacatggcagccctctttttagagtttggtttggtctttttggctagcggtgctgcacgaagaaatacacctgcggccctacctctatttttggtttactccgctttgaatggatttacacttagttttatcatcgttcaatatacgcaagccatagtttttcaagccttccttagcactgccattgttttctttatcatggcccttatcggagttagtattaagcgagatctatcaggcatggctaaattccttatggcagccttgattgggattattgtggctagcttgattaatattttctttgcaagtagcatgatgagttttgtgattagtattgtatcaattcttattttctctggtttaattgcctacgataaccagttgattaaaaaggtttactacggtgccaatggtcaggttacagatggatgggcagtatctatggcgcttagtctttacttggatttcattaacttattcttgaatatcttgcgactctttgctagacgtaattagtaaaaaaatcagccatctggctgattttttttaatgtctaatagttttttgtaagtgtcccttgctgacctgtgtaagcgtagaagagtgggtagtaatcccattttccgacatagctatctttatctgggaaggcccacttgtcgtcttttttagtaagctcgactgagtaattatcaaagatatttgttccttctgtctttggtgctgatggacttacttctttgattgaattcggtaggtaagtttccatgtagtattgtcttgttagttggtcgacatttccagcgttagcaccattgctttgtaggtagtttttaaggtcatctgtgagatttgggtgattagcaccataggcatcgtctgcagctttcatactgatagttgacatgctgacgttaaactctgctttatctttagcgacgataatgttatcaacagtgtagctaccgcgttcacggttagcagtttggacccaaccaaaaacttttggaatttcatcaccggttggtttgatgttatcagttgcatcatagctgtattgaaggctatctgagaaatattggttaagttcacccttggctttatccaagtcgttagaaacaaatttactgtagtctttgctttcaccacctagaagaactgcgttgaaataagcgtcaatagcctttttaacattggtagttgttttaccatcgaaatcttttaggctagtagaaactgtttgtccctctgttttctcatcttttgattcaaaatagagtttatagctttcgtcgttgttaacttcgaaaaagagtgagacagtcttgtagtcgtcagcttcaagcttcccaaagtcatctgtagcgtcctctacgttcttatttttattgaagagagtaggtaggtcgcccttatcgagcttgcttgctgtgacttttttaccatctttatctttgaggtagaattgtttagcagatgttttgagctcattttccatatcttccgaagtattctcgagtttgaatgaaacttcgactagggtttggtcatccttgagcttgaggtcgcttcctgacatatagacaatatcgttaacagaaagcttggcatcaagttttggtttggcacatgctgagagcgttaagatggctgctagagcaagagccccagagtaaagatattttttcataaataatcccccattattttatttaggttataggtctattgtatcatgaaatatgccttgagattattagaaaattgggtttcaagccttttcttatgctataataggattactattgtaaaaaatggagaatcaaatgacaaaaacaccttttattacggctgataaacttgaacaaatcactggagaatttccaacacctttccatatttacgatgaaaaaggtattcgtgaaacagcgcgtgcagttaacgcagccttttcgtggaatccaggttttaaagaattctttgctgtaaaagctacacctaatccagcaatcctcaaaatcttgaaggaagaagggtgtggtgtcgattgtgcgaccgatacagagcttgtcatgagtaagaaaattggttttgatagtagtgccattagctttacgtctaatgatacacgtgctgaagagtttgtttacgcgcgtgatattaatgcgacaattaaccttgatgcttacgaagatatctttttcttggaagaggctgcaggacttcctgaaaccctttctttgcgctttaacccagggggcgtcttctctctcggtactgatatcatggatcatcctgaagaatcaaaatttgggatgactaaggaacagctcttcaaaggctatgcctaccttaaagaaaaaggagtgaaatcattcggtttgcatgctttcttagcgtcaaatacagtaacgaatgagtattacccaaccttggctgctcaactgtttgaattggcggtagaaatcaagaatgaacttggtgttagccttgactttatcaacttatcaggtggtgttggagtggactacacaccagccaataaacaaaatgatattgccgttatcggtgaaggggttcatgctaaatttgatgaaatccttgttccgaatggtcttggacacatcagtatttacactgaacttgggcgtttcatgacagcacctcatggccttgtcgttactaaggttcttcatattaaagacacttatcgtcgctatgttggtgtagatgcttctgcggtcaacttgctccgtccagctatgtacgatgcctaccaccatatcacgaatatgactaatccagatggtgacattcaagtagttgatgtgacaggttcgctttgtgaaaataatgataagtttgctaagaaccgtgaattgccagaagctcgtattggagatacattggttatccacgacacaggtgctcatggtttctcaatgggttacaactataatggacgtcttcgttctgcagaaattctctaccaagaagatggcacagctcgtatgattcgtcgtgcagagacgatgaatgattactttgccactcttgatggttttgattttgatatttaacaaaaaataagctaggccttaaaggctctagcttattttactttaatgatgacagcttcaagaatgatatcggctaactcctcaggggattcgatacagccttctttgagccatagtgttaaaatggtaacaatggtgctaacataaacttccaatgaatatttggcagggatatgatagctttgttccatgagttctgtaacattttcaatatcagagttaaggatagtctcgataatgaattcacgaatcatctcattgatgtttggaatgtgtgtcatcaaggtgagacagagtttttgattttccttaagatatcgtagcatttcagtgacaacaccttcttggtaggtcatgtcttcctgaagaatacttgagattttatctaaaatctttgagaaggttgtttcaaccaaatcttccttatttgaatagtagtagtagaaggtcggtctgctgagatttgccttcttgatgatatctgtgatgctgatttgttcgagtgaactctcctctaagagttcaataaatgcgttgacaatttttcgttcggaaatagttgcttccttgagcataaataaacccctttatataaacataataataattccacaacctatataataacctatttttgttctagaaatcttacaagtcctttacacttgtaagtgaaaaatactgaaagtctcattttatcggtattttaaacgaaaaaactatttttctagacgtttttcagaatcaacgtcttatttgtcagtagggcccatttttgctataatataaggtaaatcaacgttataggagaaatgaatttatgaacaccgtcctttggattattcttgtttttgtagcccttttgggtggtttttatggaggcgcatactttgcccgcaaacaaatggagaaagaattggctgaaaatcctcgtttgaatgtggacgctgttcgtaccatgatgtcagctgcgggtcaaaaaccaaatgaagcaaaagtgcgtcaaacatataaccaaattatcaaacaacaaaaacaagcacttgcagatagcaagaaaaagaaaaaataatggtggggagctgggacgtgaatctcagctttttacatgtaacctaggggataaggaggcaagatggataatcgacctataggatttttagattctggtgtcggaggactgacggtggtacgtgaacttaaacgtcagttgcctcacgagtctattgtttatattggtgactctgctagggcaccgtatggtcctagaccggcagaacaaatcagacagtatacctggcagttggttaaattccttctgaccaaagatgtaaagatgattgttattgcctgtaatacggcaacagcagtagtttgggaggaaatcaaaggagccttggatatcccagtgctaggtgtggttttgcctggttctagtgcggctattaagtctagccaatcgggtcatattggtgtcattgggactccaatgacgattgcctctaacatctatgaacaaaaaattaagcatttggcaccacaaatgaatgtcttgagtttatcttgtcctcgctttgcccctattgttgaatccaatgaaattaactcaagtgtggctaaaaaaattgtttatgaaagcatggcacctttagtcggtaaggtagataccttggttttgggttgcacccattacccacttttacgtcccatcatccaaaatgttatggggccaagtgtcaagctaattgatagcggagcggaaacagttcgtgatgtttctgttttgctcaattattttgagattaatcgcagccgtgaagtcgaagacaagacggaagaatattacaccacagctagtgtgctaggttttaaagaaatcgcagaacaatggctgggtgaagaagttgctgtccaacatgtcgatttggacaaggagttagaaaatgactaaatcaatttttgaatataaagacgaacaagactggtatttggctagttttggaagctacaatcacttgacttgttttggtggtgatgaggcctatgagcaatttgttgactttttccaagctttgactaacgttttggctgttagtggctttcagttacatattgcgaaacattcttcagaccttcgcttggtatcctttattttggattgcttgaaagaggaaactggtcgtgacctagctgttacgcaacatcaaggggctttggtagttagtgaaggagataagcttgtctatgtgcatgtgcctagagaaggtgttgccttgagtgatttctttggttctgataacaaatcagactttggtgatgtcctattgattgcgacacgcaatgaaggaaaaaccaaggaatttcgtaaactatttggaaaactaggcattaaggtagagaatcttaatgattatccagaccttcctgaagttgctgaaacgggtatgacctttgaagaaaatgcacgcttgaaggcggaaaccatttctgaattaacaggtaaaatggtcctttcagatgattctggtttgcaggtagatgttcttggaggtttaccaggagtttggtctgcacgctttgcaggtcctgatgctacggatgctgaaaataatgctaaattattgcacgagctagctatggtgcttgatgatagcaaacgtactgcgaacttccatacaaccctagttgttgcggcccctggacgtgatagtttggttgttgatgccgactggaagggttatattggccgagaacctaaaggtgacaatggttttggttatgatccactctttttagttggtaatacggggaaaacggcagcagagctttctgcagaagagaaaaatgaacaatctcaccgtggacaagctgttaagaaacttatggaggtcttcccagcatggcagaacaaacaataatcgtaatgagcgactcccatggagaacgtgatattgtagtagatataaaaaatcgttatcaggggaaggtagatgctattttccacaacggagattctgagttagaatcaagtaatcctgtttgggacggtatccatgtggttcgtggtaactgtgattatgattcaggttatccagaacgtttggtcgttaaacttggtgatgtgattattgcacaaacacatggtcatctttatggcattaattttacctgggacaagttagatctttgggcgcaacaagaggatgcagatatttgtctctatggccacttacatgcggcagcagcttggcgaaatggtaagacagtgtttatcaacccaggttctgtttcgcagccacgtgggcctatccatgagaaactttatgctaaggtgattataaacagtgcaaaaattcgtgtagaatattacacacgtgaccatgaactttattcagaacttacacaggaatttgaacgatgattgctaaagaatttgaagattttttgttggctcatttagataattatttaattccatcagatcaggttgctatttttattgatagtcacaacgctgatcatgtggtcttgcttttgacaagcaatggttattcgcgcgttcccgttttgactaaggataagcactatcttgggaccatatctttgacggatattaagcgttatcaagatgaacataacttgcaagagtgggagatggttaaccgtgatatcgggccgatgacatcagatgttgtggaaacagtggaagataatgccaatctaaatgaggtaatgcataagctagttaataatcctttccttcctgtggttgacagccaaggtattttcaaaggaattatcacacgaaaatcgattctaaaggcggttaatagcctcttacatgactttacacatgactatatcatcattccaaaaacaactgacaactcagatcactgattttctggctactaaggtcatttcggagagttcaaagcaagcttatgcttacgatcttaagcagtttgcaatgtctatttcaggacaaattgatcaaaccagtctcaagctatatgagaaccaactgaaggaatggaagccatctgtacaaaagcgtaagcgctctgcggtcaatcaatttttgctatacctctatcaaaagggtgaattagagaaatttttcaaactatcagagaaggttacgataccttctcaggaggataagttgcgaatactggatctttcatcgctttatgaggggcgtgaaggggttggtaagctggcttgtctgctgattctagagttggggctcttaccttcagagattttggagttggactgggccgatattgacttggattttggtgttgtaactgtggccaagggaagcactaagcgtgttctcagacttgaagcagatgtgaagcagtatttgttggctattaaagatgcgaacagccagggcttgcttttgggtaaggtctatactcgacaatggctgtataagcaaatccagacttatgttagtgactgtggcttatcgaatgtaaccgctcaagtcttgcgtcagcaatttattcttagacagattgaaaagggaacgggcgcctttgaacttgctcgtttactgggactaaaaagtccagtgaccttggagaaatactataaaacctaatggatattaagttaaaagattttgaggggccactggatttgttgctccatctggtttctaagtatgaggtagacatttacgatgttcccattgttgaggttatcgagcaatacttggcttatttggcaaccttgcaagccatgaagcttgaagttgctggggaatatatgcttatggctagtcagctcatgctgattaagagtcgtaagcttctgcccacagtggtggaagctgagcctgaagcagatgatccagaactagagctcttgagtcaattggaagaatatgcacgcttcaaagcagctagtcaagagttggctaagcagcatgaggtacgagctcagtatttttcaaaaccaaaagttgaattggtttatgaagatgtgacgctgaatcaggataagaccattcaagacattttcttggctttttcaaaaatcatggctgaaaagcaggaagaaattcgtcgcaatcacacgaccattgcgcgtgacgattataagattgaagacatgatgctgattattgaggaagcattcggctcaaaaaatgagctacatttagatgaacttttcacagatgctaaagatatgaatcaagtaattaccctctttttggcaactcttgaattgattaaggtacatcgcatatcagtacagcaggaaacaatttttggtacaatcacattaagaaaggaatggacgaatgagtagtcacttagcacgattagaagctttactttttgtggctggtgaagatggtcttagtctacgtgctatggcacagcttttggaaatgccagtgacgggtctgactcagtccttggagaaattacaagccaagtacgaggcagacgaggattcagctctttgtttattggaatcgtcaaatacctataagctggtgactaagccagattttgcaagtctccttcgtgactattctaaaacgcctattaaccagagtctatcacgagcgagtcttgaggtcctctctatagttgcttataaacagcctattacacgtgctgaagtcgatgacatcagaggtgttaattctagtggtgctattgctaaacttcaggcctttgatctcattcaagaggctggtaaaaaagatgctgtcggtcgtcccaacctatatgcgactactgattattttttagactatatgggaattaacagtttagacgaacttgtggcgattgaccaactagaacttgaagagcaggaaacaagtctctttagggaagatgctccagaagagcttgaggactcggacaattaagagtaaaccttgttgaaactaatcattaaaaatagagaaacatagcagagatgctaggtagaaaggatacagcttaagctgtagaaaaagaatgcgaattaataaatatattgcccacgctggtgtggccagccgtcgtaaggctgaggaactgattaaagaaggtcgtgtgaccctaaatggtaagaccgttacggaattggcaaccattgtcaaaaatggtgatattgttgaggtaaatggtagcccaatttataatgaagagaaggtctattatcttcttaataaaccacgaggggttatttcttcggtatctgatgagaaaaatcgtaagacggtgattgacctcatgccccacgttaaggaacgtatctatcctgttggtcgtcttgactgggatacgactggtcttcttattttgactaatgatggtgactttaccgataaaatgattcacccacgtaatgagattgataaggtttatttggcgcgtgtcaaaggtattgcgaccaaggagaatctccgtccattaactcgtggtgtggtcattgatggcaagaaaaccaagccagcacgttacaatattatcaaagtagaccatgaaaagaaccgttcagttgttgaattgacaattcatgaagggcgtaaccaccaggttaagaaaatgtttgaatcagtgggcttgctcgttgataagttgtctcgtacccgttttggaacccttgatttgacagggcttcgtccaggtgaatcacgccgtctaaataagaaagaaatcagccagcttcataacgctgctgtcaataaggtcaaataatgaaaagatttctgattgccttggtcagagcttatcagagatggatttctcccctatttccaccgtcttgtcgttttcgtccaacttgttcggtttatatgatccaagcaatagaaaagcacggtttaaagggagttcttatgggaattgcccgtatcttaagatgtcaccctttatcagagactggagatgatccggtgccagattattttagtctaaaacgtaataaaactcctttggataaatgaatccaaaggagtttttctatgcttaagtttttgaccaagtttttggtaggaagaggagtaataaaggatagatttccaaacgtcctgcaatcatagcaaatcccatgataagcttagataaaggactgaaaatagcaaagctatcactcgttccaagtaatggtccaatgttgttaaaggttgaagcagcagcacttgtcacaatcaagaggtcttgattatccagtgacaaaacagtgactaaacttagtataatgagtacatatacagctaggtatttgagaacactgtgctgcgtttctttatcgagaacacttccattaatatgaagtgacaggatacgattaggatagaggctagccagggtctgatttcgtgcaatcttagcaataatcatagcacggataaccttgaaaccaccagctgtagaacctgctgaccctccgataaacatcaggaggagtaggatatactgagaaaagagtggccatttggtaatatctgtcagaccaaaaccggttgttgtgatgatagttgacacttcgaaaaatgagtatttgaaagagtcagccaaattgtggtagattccaaaaatattgaggataattaaaccagttgaaatagccacaatcgcaaagtaggtacgtagttcttcatcttggaagaaaaacttgattttgcgaaggaggatatagaaataaaggttgaagttaaccccaaagagtagggtaccaacagtaaccacataggtaatcagatcgctgtggtagtgggcgatagagtcattatagacagcaaatcccccagtacctgcgccccccatagcagtgatgatactatcaaagattggcataccgcaaagccagagaataacagcaaaaataacgaacatggttaaatagatgatgtaaagaatttgagctgtatttttgagcttggccacgaccttaccaaaaactggaccaggcacctctgcacgcataacctcatggtgaccatttttactgttgttcatgatggctagggcaaagaccaatacccccatccctccaatcaagtgggcgaagcttcgccagaagaggagggagtgggtaagtactccagtatctgtgagaatagtagcccccgtggttgtaaaaccagagctcatctcgaagaaggcatcaatgacacttggaatctgtccagcaaagacgaagggcaatcctccaaagaaggaccagagcacccaacagagggctacaataagcatcccttctttggtgtaaatatggtagttcttcggtttaaagagagtaccaagtactccgagaaagaggagaatccccatcgtacccaagatgctggcaaatactttggcatcttcttgataaatgagggcaacgataagtggtacaaccaagagagcagcctcaataagcaggagcttggcaataagaaagcggacaatagatcgattcatggcagcttacctcttcaacaagtcgtaaatatgagttacattttgtaagagtgtaacgatcacgattttatccccaatagcgagtctgtcttctcccgttgggaaaatagattttccattgcgaataatagcagcgataaggacaccattagcaaattcaagctcagaaagtttcttcccagcaattttgttattctctttgatttggaactgcagtgtttcgatacggccattagccacgtggtgaagggcatcaagactagaatctttggcattataacgcccacggacaaagtgcattacagtgtcaacggcaatactcttaggtgtgacaattgttgttgtctcacgtgtatcgataatctctaaaagactggtacgattgactttagtaatattcttgtgaataccaagactttcgaggaacatagaggtaatgatattttcctcatctactccagttagggtggctacggcatcataactggctgcactttcctcgagaagaaggtctttagcggtaccgtcacctaagataacagaaacttcagggaagacctgactaaaggtttgcgcacggtccattttttgctcaatcaatttgaccttaatacgattgtttttcaagatattgagcaagtagtaggagatgcgcccagcaccaatcaacaaaagttttttgatgctttttggcttgatgtaactgtggaaaagtgccatatcaacacgtttaccagtgacataaatcttatccccaatttgcatggtagcattcccgtctggaatgatgagttcaccttgacggtcaatcgtacaaacgagaatattgccgaatttcttacggaattgttccattgtcataccagacaattggctattttcagtgactttaaatgccataagaataacgcgtccattagcaaaagtctcaactgatagggcgtttggaaattcaactgtattggcaatatagcgagctgttaaaagttcaggattaactactaatgagaatccaagaaagtttttgtctttgaaataagcatttgagtattctgggttacgcacgcgaacaatagtttctttggcacccatttgtttagccagaacggctgaaatcatgtttacttcatctttgtcagtcatcgcgataaagacatcgcagttactaacctcggcttgttccagaattttaaaattagccccatttccagcaaagcccataacatcgtaacgtttgctgaggcgtttgaggacctcttccttttcttcaattaaaataacatcgtgcttctcttcaacaagagaacgacagagtgcggtaccgactttaccggcacctacgacaataatacgcatgagttacctccaaataatcattactatgatactctattttagcggaaaaatcatccttttcagctagctttatcaactattcctatttaagtgaataaaggtgaaatttttctttaaatagtattgacttttagaccagaagtgctaaaatatattcaaagattcgttattttaaatctaacctgtcatgatttaagctaatgaacgtccacaaccatgtcgtctgctgagcttgactccgggcgacatggtattttttatgtctaggagaattgagatgtcacgtaatcatattgtcttgtttgaacctcgtattccacaaaacaccggaaatattgcacgtacctgtgcagcgactaatagccctcttcatatcatccgtcctatgggctttccaattgatgacaagaaaatgaaacgtgcaggtttagactactgggataggcttgacatcacttattatgacaatttggcagatttcatgtctaaaaatcaagagggccgtttgcatttagtcacgaaatttgcggataagacttattcagaagaggcctatgccgatggtgaggaccactattttatgtttggtcgtgaggatacaggcctacctgaagattttatgcgtgagcatcctgaaaaagctattcgtattccgatgaatgatgaacatgtgcgtagtctaaatgtgtccaatactgtttgtatgattgtttacgaagcgcttcgtcagcaacaatttgaggggctagagctgagtcaccgttatcaacacgataaattaaaatagatacttcattttgttttaaaagaataattatagtcattgactatcaacagattagaaatccataatttgaaaaccttgtcaccaaggtttttttatgttatccttaaaaggtcttcagggcagggtgaaactcccgaccggcggtgattctttggataagtccgcgagcgcaagctgatgaggtgtaattcctcaaccgacagtacagtctggatggaagaagaccagtctttttgcgtaggctttttttggcatgggcaaatccattgggaacttctttcaaattgttaaaatttggaggaatttttttatgacaaacacacgtaaattggcttacattgccattttatccgcagtttcattcttgttgctttatttttcatttccattgattccagcagcagattttttgaaggttgatttttcaattcttcctgttcttattgccttggttatctttgattttaagagtgccattggtgttctcttgcttcgttcattgttgaagctcttgctaaacaatggtggaccaggatcaatgattggacttcctatgaattttgttgctctaggcgtctttgtttggggcctaagctatttttggaagaaaaatcaaacaagcaagaattatattcttggttctgttgtaggaactgtcttgcttacagttgttatggttattcttaactatatttatgcagtaccactctatgctaaatttgccaactttgatattgcgcaatttataggtctctataaataccttttcgctatggtagtacctttcaatttacttgaaggtttgatttttgcgctagcctttgctttgatttatgctccacttaagtctattctagtaaaattataaatatgaaacacaaacacacacattatacttatgcttcttttgccttattgttatttgttgctctcggttatatggttaagttctatcctgaagccttgacaggatttgatagcaacattcaaacttgggttcgaggaggattaccagcaggattgacacgcttttttaaaacgattaccatgcttgggaatacgcctgtacaggctattattgcaatcgtagcagtcatctggctttatctacgtcagtataaatcagaagctatctttgtgggagccagtgggcttctcgctagtatcttgattgtaagtttgaagtatatttatcagcgtcagcgcccatcaattacgcatttagtgcatgctagtggttattctttccctagtggtcattctttgggaacttttatgattcttggagcaattgccattgtccttgctcagcgtttggagaaaaaagaatctaaaatagtagtttatgctattaatggacttctgattttccttgttggactttcgcgtatttatgtgggtgttcattatccaacagatgttttagctggctttaccttagcctttggtttgcttaatgcgatttatccaacttatgaccgcattcgctttgaatggcgattccaaagtaaacagaaataaaaaaacatgtagttttgaactgcatgttttttgatacaaaggaaggtctttcctatataaaatgtataaaaatagcttattttcactattgttctgttaaaaatgcattaattgtatattaattatattataattatgatataatgtttttaaaatttcgaaataaaggagtgtctcttgaacataaaagacagcattggactaagaatcaaaactgagcgtgaacgccagcagatgtcacgtgaagtgctatgtttagatggtgcggaattgactgttcgtcagttaattcgtattgaaaaaggggagtcactcccgtctttggataaattatcttatatcgccaaacgtctaggaaaaaatatggccgatctattggatcatgacaatattactatccctgacgaatactacgagatgaagaatcgtttgattaagtttccaacgtatagaaatccagaaagaataaaggctaaacttgccttaattgaggaggtctacgagaaattctttgaacttctcccagaagaagaattgttaactctagatattttggaaaatattttgagttttactagttgggaagagagtccaaaagttgaggagatatatgaagacttgtttgaacaagtcaaaaggaagaagaaattctcaactaacgatttattagttattgactattatttcttccatctttatggaagaaaacagtatgataaaaaactttttgaaagaatcgtaaagagagtattaaatcaggaaatttggacagacgatgtttataatattgttttatttaatgatttgatggctatcgctgctttgaagatttttcataattccttctcagacttcttaacagttgtggataaagccttagctgttatagaaaaatcacaattctatagctataaacctagtgtttttgttctcaaagccaaatatgaacttcttcataaaggaaacaagaaagaggctgcagaaaattatgataaggccataatgtttgcttccgttttagaagactcggttttagaggaaagtataagggcaggaaaagcggcagatggtttatagaaatggtggtgacataaatgtcactacttttttaatggttaaatgtttactatagaaacataaataacagttaaaaggagttttattttgaaaaaactaaaattatttacactattctcactacttatcactatcttgccctattttacaggttgtctttaataaggagtcaccatgtcaaaatatccatatatttcacaggttgatcagcgtgattgtggtgtagctgccttagccatgattcttaaacactatggttcatcttatagtttagcttatttgcgggagttggctcagacttctcgtgaaggcacttctgcgcttggtttggttgaagcggccaagcagttgggtcttgaaactcaggccattcgtgcggatttagacttgtttaaacaagaaagcctatcttatccttttattgcacatgtggttaaagaaggtggactgcaacattattatacggtgtttggtcaaatcaaggggaagcttgttattggtgatccagatcctagcaagaaggtcattaaaatgcccttagaggagtttgccaaagagtggacgggagttgctctcttttttgttccaggagaaacctacactaaatacaaagaagatgtgcctgggcttctttcatttttaccaattttgtttcgtcgtaagggattgattgcagtcattgtcttactgagttttctagtgacccttgttaatattattggttcttattatttgcaatctattattgaccgcttgattcctcaggaggcctacactcttctgacaatgatttcgctaggcctatgtatctcttatctagctcaacaagtatttacttttttcaaagattatcttctacatcgattggggaattacttgtccattgctgtcattcttccttatattaagcatgtcctttccctaccgattagtttctttagttcacgtcgtactggtgaaatcacatcacgttttggagatgccaacactattatcgatgctctagcttcaacgattttatcaattttcctagatgtgaccattgtgatgactctagctgtggcccttattttacaaaatcagtcactttttgtgatgacactcacggtagttcctctttatgtgttaatcattttggccttctataagctttttgaaaaggaaaattatcaattgatggaggcaaatagtcaggtcaataccgctgttattgatgatttgcgaggcattgaaaccttaaaatccttgagagttgaagagagacggtatcaggaaattgaggtgaaattccatgactatttgaagaagtctttgtctaaggctaagtggcaattaacgcaggatggtttaaagacgggggttcagttagtttccaatgtctttatcctctggtatggggcacaattggccatggaaggacagctatctgcaggtcagttgattacctataatatgttgctgaattattttacaactcctttaattaatattatcaatctccaatcaaaaattcagcaagccaaagtagccaataatcgtcttcaagaagtttatgttgtggacaaggaagaaaaaggaaaacttaaagagttatcctttaaacaacttgctcttaagggtgtcagtcaccgttttagttatcagcaagagacgcttagtaagattgatttaacgattcataagggtgagaaaattgccctcatgggtaaaagtggatctgggaaaacgaccttagcgaaaatgttgtcgggttattacacaaaatctagtggtcatgtaaccctagataaagatgctattggccatgcggagctgcgtcaaatggtgacttacgttccccagcagacctatgtgtttactggaaccattttagaaaatctgctgttaggatttgaaggagaagttgacgagaaagagcttcttaaggtttgccaacaagctgatatcttaaaggatattcaaaaaatgccactaggttttcagacccaagtatctgaggatggtggtctatctggtggtcaaaaacaacgcttagcgatagcgaggggcctcttatccaagcagcctatcttgatttttgacgaagctaccagtggtctcgatagtgatactgaaagcagggtcatggctaatcttgctaagattaaacgaacaatgatttttattgctcaccgcaatagtgttcgtcaacatgtcggtcgtgtggtgaccatggtgagtggccagattgagtcggacagtcctaatttcaatccattccagtttatttaaaaaatcttcctattatatatgtataaaacttaagaagtctaaatattcacatcttgcacctatctccttaatatagtatactggtagcatactattaagaggtgtaaacatgttagaggcatataaaaatttttggttaggctatctcgatttttatggtcgtacaaaacgatcagactattggtgggttgtcttgattaatggagttattgctactcttattttcctactgatggacttacttggggaaacaaaagctgctggctttacattgacagctttcattctatttatagcagcaacggcgcttcctaccatttctattcagattcgtcgtctgcgtgatgccaatttcaatgttgcttggattgtattaaaagcaactccattaacagtagctctttgggtgatgtatgcctttcctacaagagattcaaaataactccaatataaaaagagtgaaactagttaatctagttccactctttttttcttataaaataaagctacctaagaggctaacgagggtaaagctgatagttgcataaaatacagcgagacgggttgcctgaataggtttatagagtcgaattagtgttaggacacaccaaataaagagtactgtgacaaaccaacctgacagtaagcgacgtggcgtcacaccgtagagtgccatataaacgccaaagagtttccagccagcgataagggcaaagaggctagcaaaagtaaagagtagggtacttaagaaacgaagccctttgtgagtgaagaagttttctttagaaaaaatgtaaagtccagctaggattcctaagttgagggtagaaactcgaaccaattgccagaagccttgaaccgcaatatgtgaggcttgatgagctggaatgctggcttggttgagagaaaggagttctcccatttgactagtggcagttaatatgaatagggcgtaagtgaagcagaggcttccgagtacgatataagctgctacttttgggaactgacgtgtcgctttaagatggccttcaaatcgtttttgactgagtggcttttcttttgccaaataggttgcagcgagttgagcaagaagtcctagagccagagggatactggtgattaaacgagagaataataatccgttgtccttgaaggtgagggtgaaattaagtaaagaagctagtgtctggaagaactgtcgccaaagatttccgaaagcaggcaagacctgactaagctgactagcagcgaatacagtcagtaccaaggctatcatgatactaatgaaaatcatccatttgtggttatgaactgcgtgtttttcttcttcagagagttcttgtttaggtgctgttttatagaggagtgtccaggctccgataaagaaatattttagtgggaagatgcagctggtgtatatgaggtctagccaaaccataattcctaaacgatcttgactactttgtccagtgcgtgccattaagtaaaggaggatacttgcatgaaggcaaagaatctgagcgctgccccagttgtcgtgcagaccccagagactaatttgcaagccttggaggagactagtgaccataaatattcccgattcaagtctcattcccttcgcttttccacctaataggcgacagcccagttcaatcgtactgatcaagacaagggttgctggaaaggcaaaggaaaaatgggtcaagtaagtgacatacaggaagcaggccacgagacaggcgacaaacattcccttaattttccaaatgtcttttggtgaaaaatgttccaagagtttcttggttttggtttgaagactagtcttttcgtcggaatattcctgggagactagctgtaaatcagtagtgtagttatttgtttccatcataattctccttttggattttagtccaaaaaagactttatcataaaaaacgtttgactttgttaccaaactgtaaaattactaaaaataggtctatggacttaggtctggagaatgagttggaaaaataggcgagaaaaaaatattatgctcacattgaatgatagattgtacgggctatattgtcagaaactgtcaaatactaaagatagctttttatagattaactgtttatttatctgggattaaacagaggactcctattgagaattaccaaatgtaatgtcattttttgacaccacatgttagcttgactaacatgtaaatgttgcaaaatttctgaaaattcgttgacatgtgttgtcaaagtagtatgatattaacataaaagaaacttaggaggttcttatgttaggtgtcatcctactctatgttggtatggttttgatgagtaatggactccatcgtttagagggtattcctgataaatcaaatgttgtcatgaatatctttacgggtggtttggggttgattctcaacattattgtcattgcttatgcagcttgtacagggcaaggcgctgaatggttttatggtagcgccactggtcttttatttgccttcacctacctttactcagctatcaatacgattttcgattttgatcaacgtttgtatgggtggtttagtttatttgtggcgattaatacgctaccagcagggattctttgcttaacatctggatacggtggtaatgcttggtatggtattatttggttcttgtggggtatcctatggctaactgcctttattgaaattaaccttaagaagaacctaggaaaatttgtcccttacctagctatttttgaaggaattgtaacagcttggattccagggcttttgatgctttggggcaagtggtaagcattgatttaaggaggaaaaacgatgcaattgacaatgcgtgagcaggaaaaaatgatgattagccttgcggctatgattgctcaacgacgtaaagataaaggaatcaaattgaatcatccagaagcggttgctttgattacagactatgtgcttgaaggtgcaagagaaggtaaaacggttgcccaattgatggatgaagctcgcaatcttttaacacgtgaagatgttatggaaggtattgcggaaatgattccaatgattcaagttgaagctacttttacggacagtacaaaactggttactgttcatgatcctattcagtaaggagaaatgtaatgattccaggtgaataccatgtggcgagtgagccaattgattataacggtggttacgaagccattagtcttgaagtgaaaaatgtgggtgaccgggctgctcaagtgggctctcactaccatttttatgaagcaaacgaagctggtcttcaatttgatcgtgaaaaggcgcgaggcaaacgtctagatattccagcaggtacagccattcgttttgagccaggtgaaacgaaaacagtacaacttattgactttggagggaaacgtcgtatttttggtttcaataacaaggtcaatggtttcttagactagaaagaggacaaatcgatgagttttaaaatggatcgtgaagagtatgctcaacactacggaccaactgtaggtgatagcgtacgtcttggagataccaatctttttgcagccattgaaaaagactttactgtttatggacaggaatctaagttcggtggcggtaaagttttgcgtgatggtatgggtgttagtgctacggaaacacgtgacaatccatcagttgttgataccattattacaggtgcaaccatcattgactatacaggtattattaaagcagatatcggtattcgtgatggtaagattgttgctatcggtcgcggtggtaacccagatacaatggacaatgtggactttgttgtgggtgctagtacagaagccattgctgctgaaggtttgattgtgactgctggtggtattgaccttcacgtgcactatatttctgccgaccttccagaatttggtttggataacgggattactaccctctttggtggtggtactggtcctgctgacggaagtaatgcaacaacatgtacaccaggtaaattccatattactcgtatgttgcaagctgttgatgatatgcctgctaactttggtttccttgctaaaggtgttggttctgagactgaagtggttgaagagcaaattaaagctggtgcagcaggaattaagacacacgaggactggggtgcgacttatgcaggaattgataattcccttaaagttgcggataaatacgatgtttcctttgcggtccacactgactctttgaatgagggtggatttatggaaaatactttggaatccttccaaggtcgtaccgttcataccttccacaccgaaggttcaggtggtggacatgctccagatattatggtctttgctggtaaggaaaatattttgccatcatcaactaacccaactaacccatacactacaaatgctattggtgagttgttagatatggttatggtttgccaccacttggatccaaaaattccagaagacgtctcttttgctgaatcacgtgtacgtaaacaaactgtagctgcagaagacgttcttcacgatatgggtgcccttagtatcatgacttcagatgccatggcaatgggacgtgtcggtgaagtagccatgcgttgttggcaactagctgataagatgaaggctcagcgtggtccacttgaaggggattcagaatttaacgataataaccgtatcaaacgttacgtggctaaatatacaattaaccctgctatcactaacggtattgcagactatatcggatctgtagaagttggtaaatttgcagatttggttatctgggaaccagcacaatttggtgcaaaacctaagttggtgcttaagggtggtatgttaacttatggtgtcatgggtgacgctggttcaagtcttccaacgcctcaaccacgtatcatgcgtaaattatatggtgcttacggtcaagcggttcatgaaacaaatcttacatttgtctctcaatacgcttatgatcacggtatcaaagaagaaattggtttgaataagattgttcttcctgttaagaatacgcgtaacttgactaagcgtgatatgaaacttaatgactacgctccaaaaacaatccgtatcgatccacagacctttgatgtctttattgatgatgagttggttacttgtgagccaatccatacgacatcattgtctcaacgttatttcttgttctaaggaagacgctatataaatgaggctggaatttttcctccaacctcttttgtattttatagccataacgtttttagcgctttattaagttgctatatgagtttgatgctagatttttaaaatgtaatagaaaaggaaaaagtatgatttttacaaaagtagatgctcttgttaaagatatcgatgtggacaaataccatattgaaacagtcattctttcgagcgatgaccttaacaaaaaaattattcgtgtgaagagtgatcacgggaatgaatttggtattcgtcttgataagggacaaaaattgcaaaatggctctgccttttttatcgatgatcaccatgtcctagctattggtgttgagtcacaggatttgattgtcatttcacctaaagatatggatgaaatgggaatcacagctcatattcttgggaatactcataaaccgattgaggtgaaagatgccaagatttatttagaggttgacccagttgtagagcaagtcttgactcaaaaagagattgcctacacgattgaagaagtggtccttgataagcccctacgccatgtgaatttaactgcccatgaacattaatccttttgctaatgtgtctttgcaagattatcttgaaattgtgcaaattgtcgattcaacctttccaattggatcgtttaaccactcttttgggatggaaaattatctgcgcgaagacactgtaacagatgataaaggttacgaagagtggcaagaagcctatttagctagtcagtttaaatatggtgaaggtcttgtaatcaaactggtttatgatgctatggctacagacaacttagagcaggtttggcattatgataaggtcttgacagtttcgacgcaagcgcgtgaaacaagacaggggactaaaatgattgctaagcaaatgcttcgactcattcaaaggcttcatgctattccggtattggatgactatcagtccaaaatacgtaagggtgaggtcttcggcaatccagctattgtctttgcgctctatgtgtttaacaagggcttgggatgtagtgaagccattgcactttatggctatagcgtgatttcgacgatggttcaaaatgctgttcgtgccattccacttggacagtttgctggacaagagattgttttacgtagcttttcgcaattagaaaaaatgacacaggaaattcaagaactggacgcgtcctaccttggggccaatacgcctggtcttgaattagctcagatgaaacatgaaacacaggtattccgcctattcatgtcctaaaatatcaacaaggttgagaggaaaaaacaatgacaaaacgtactgtaattattggagttggtggacctgttggttcaggtaaaactcttttacttgagcgtcttacacgacgtatgtccgacttaaatttagcagttattactaacgatatctatacaaaagaagatgctcttttcttggctaaaaattcaagcttagatgaagaccgtatcattggtgtagaaactggtggatgtcctcatactgcgattcgtgaggatgcttctatgaactttgaagcgattgaaactcttcaagagcgctttgaccatgatttggatgttattttccttgaaagtggtggggataacttagctgcgaccttcagtcctgatttggttgattttacgatttatattattgacgttgctcagggtgaaaaaatcccacgtaaggctggtcaagggatgattaagagtgatttgttcttgatcaataagactgaccttgcaccttatgttggagctaacctagatcgtatgcgtgaagatacccttcatttccgtaacgaagattctttcattttcacaaatttgaataatgatgacaatgttaaggaagtggaagaatggattcgtaagaatttcctactagaggacttgtaagatgacacaagtatacgatggctttgtccatcttggattttcaaaccgaaatggtcgtacaatttcccacaagaaataccaagaaggtaactctcgagtgtcagcggataattcagatgccaatggtgttccttactatttcctaattaatatgggtgggggctttgtcgagggtgagcagtatcaagtgactattgatgttaataaagatgctcatgccttggtaacaacccaaacacctacctatgtttacaagtgtgaaagagggcagttgacgcaacaacatacgtccatcacacttgaagaaaatagctatttggagtacatggctgatgaagttattccctatttgaaatcacgctatttccaaacaagtcgtattgatatggacaagtctgcccacttgatttattcagatggtgtgacggcaggttggtctcatgaggatttgccgtttcaataccattattttcgtaatttgacacaaatctaccaagataatgagcttgtttatagcgatcagaccctcttagagcctcagaaacaagatatgtttaaacttggttattttgaaggctggcgtaattataatagtttggtaatggtgtcaccaaatattgacgaggcttttgttaaggttttgcagaagcacttagaagatctgaatttagagtctgattttgctatttcatccttagatatcccaggtctggtgttacgtatcttaggaaaaactgctgaggataatcgtcgcgtcatttatgcctgtgcagactattttagacaagaaatacatggattaacccctttgaatttgagaaaaaatgatatgaggagataaaaaatgcatattcctgaaaattacctaagccctacgacttgtgcggcaatgggggcagttatgttgcctatttggtataaggctgtcaaggaagtaaaggttaaagttgatacggataaaaaaacgattcctatgttgggaatcgggacttccttgtccttccttatcatgatgtttaatcttccagccccaggtggaactagtgcccatgctgttggagcagtgctaattgctatattgttagggccttgggcctcctgtttagcagttagtgtggccctggctatgcaggccttgctctttggtgatggtggaatcttggcctttggtgctaacgccttttgtatggccgttgttatgccatttgtaggttatgctgtttataaactcttgaataagtggacaaagaacaggataattgccagcttttttggaggttatattgggattgtagctgcggctctgactgttgcagttttattaggaattcagcctattctctttaaagatagcagtggtaatccgctttacaatccataccctttgagagtgacacttccagtaatgggcttgactcacctcctcatcggtttggtagaaggattcttcacagctggtgttcaagaattcattgaacgtttgaatattgataatactcaggaactaacgactaaaaaactacgtccgttattgctctttatcctagccttgattatcctaacaccacttggtttattggcgacgggaacagcttttgcggaatgggatgtcaaagagttggtggaaaaattggctcattatcatgtggaagcccaagcgccaaaaggaatgttgaatggtttctcattcaatgctctcttcccagattatagtattgcaggtattccagaagtcttgggttatgtcttgagcgctgcttctgctgttttgattttcttcatcctctatcgcttgattttcggtagaaaggttgaaaaatgattctgccagattggatgtcggaagagcgcccggtagtcactaaagtcggtagaaataactttcttatccggaatcgtcaccatctggaagctcttcttcaaaagtttgaaacgcctcctttaaaagtagcatcagtctttcatccaactgctaaggttttacttctctttttcttacttatttcagtaggaattagccgaaatctcacagttttgtggattctagccttgtttttaggagctggagtggcttttctgccacattctattttagtaagaaccttgaaaaagaccgtagtgttgttgatttttcctttagttctttatctaccacatctcttacttagcggaggtcaatcgctctttctctttagacttcctttgattgctgtagccattgcttattattcagagacgagtacaataagtgagatgttagcggcattaaaaggattgcattttcctgatcttgttctgctccagttagatatcaccataaaatatatcgatgtctttggaaaacaattaatggatttgctcaaagggattgaagcacgaagctttggtggcaatcatcgtttccggattggaagtaatatctgggggattttataccttaaagctattcgctatggtgaggaactgactcaagccatggaagcacgttgctttgttggtgagtatgtcaagtcatcacagtcattcacatggaaggattggctggccttgataagtctagtagcagtgattttaggacagattctgttaggaggatgagatgtttcaattgaatcaagtggcctgtgcctatgaacaaaaaaaggtctttactggtcttgatttggagattagacaaggacaatatgtgatgttgatgggagaaaacgggactgggaaatcaagtcttatcagtttattaaccggcttcaagcaggaagaatctggacgcattcttttcttaggtaaggacctcaaagaatggctgaaggacaaacgtcaaaaacgagatttttatagccgcctcggaatcctctttcaggatgtggatagtcagttatttaatagtactgtctatgatgagattgcttttggtcctcgtcagctaggtctgaccgaagaagaagtctcacagcgggtccaagacacactatccctgctgaaaattgaagatttaagggatcgcgttccctatcaactgtctggtggagaaaagaagaaagtggcctttgccagtatcatggtaacgaatccagatgtctatattcttgatgaacccttcaataatctttctaaagaatatgaagaattttttagggaacttctacatgagcttcattcatctgggaaaaccattatcatgtctgctcatcactttaagcaccttcatcatgaaaaggctgatgttcttctttttgaagatggcaaagctgatttctttcctgcccaggaagtgctcaataaccagcaagtgattgagcgtttgtcacattattaattaggaataaggtagaaaatcgttattggttttctacttttttcttgtcaaacaattgatatttttaggtgatagtattttcttatcaccttgattatgtttaagtattagttaagcttagtgaattctgttacaataaaaacaatcaatctcaaaggagaatattatgaaacttaaaaaaattcttggaattacaggtgtagccattgcttcagtagcattgcttgctgcatgttcatctaaatcatcaaaagaagcatctaaatcttcaggtgctaaagaaacaattaactttgccacagttgggacaacagcaccgttctcatatgaagaaaacggtgaattgactggttacgatgtggaagtggctaaagcagtcttcaaggactctgacaaatatgaagtgaaattccaaaaaacagaatggtcttcagtcttcacaggtcttgactcagctaaataccaaatggctgggaacaatatctcttattcagaagaacgtgaccaaaaatacctcttctcatatccaattggtaccacaccagctgttttgactgttccaaaagatagtaatattaagaaatatgatgatattgctggacactcaacgcaggttgttcaagggacatcgacagcgacacaattaactgaatttaacgataaacattcagacaagccagttgaacttaactacacaaatgaaaatattacacaaatgttgacaagtttgaatgaaggcaagtacgacttcaagatctttgatgcaccaactgttaatgcaatcatcaaaaataataagttgagcaacttgaagacgattgaacttaaatctgatgaacaaccatacatctacttcttgttcgcagataaccaaaaagaccttcaaaaatttgtaaacaaacgtttggaagaactccaaaaagatggtactttggctaaattggctgaaaaattccttggaaataaagattatattccaactaaagacgctttgaaagttccaagcaaaaaataagaaaggagctgggaatgattctcagcttttttatataattaaaatctaggacgggttatagctaatagctatagagatatacaattataaacaatttgatacaattcttatcctatgggataataattttatacttaaaacaattaaagggagttcgttatgaaacttaaaaaaattcttggaattactggattggcagtcgcttcaacagtagctttggctgcttgtggtgctggtggtaacaaatcagctaaagatgataaaacgttgacagttggtgtcatgactttggatgatactactgagccattgtgggataaagtcaaagaattggctaaagacaagggtgttactattgagttgaaagagttcacagactataaccaaccaaatgaagcccttaaaaacggtgaaatcgatgtcaatgctttccaacacatttatttcttgaacaactggaacaaggaaaataaaggtgatgttgttgcagcagctgatacacttcttagtccaatccaccttttctcaggtactgaaaacggcaaagctaagtataaagatgttaaagatcttccagaaggagctacaatctcagtacctaacgatggtacaaatgaaagccgtgctttgacacttcttcaaacagctggtttgattaagttggatgttaaagatggtgaattggcaactatcaagaacatttctgaaaatccaaagaaattggacatcaaagaaatctcagctgaacaagctgcccaaactctttcatcagtagatgcagcggttgttaataactcatacgcacaacaacaaaacgttgactatgatacaactctcttccaagaagatccaagtcaagatttgaaagattgggttaacatcattgcagctaataaagattgggaaaaatcaaataaagctgatgctatcaagactttgattaaagcctaccaaaacgatgaagtagcacaaatcatttatgatgcatctaacaaggttgaccttccagcatggaaaggtgccccaacacaagatcaattgaaagctaattcaaagaaataagctaaggacagagggcgtgtgagagcacgccattttgtcgtgtatgaaggagacgatttgatggcattttcaagtgaagaagagcagttacgaaaatttcgtaacgatgaaattgctcagcactattttgaagtcttgcggactttgatttctaaaaaatctatttttgctcaaaatattggtctctatgatgtggctgcttaccttggtgagattttctctggtgttggcgcagaggtgacaattgacgagacctatacagcaccttttgtcttggcaaaattcaagagtccaaatccagatgcgaaaacaattattttctatcaacactatgatacggttcctgcggataatgatcagccatggacagatgaacctttccgtctgactgttcgtaagggctacatgtatggtcgtggtgttgatgatgataaggggcatattacagctcgtctgacagcccttcggaaatatattcgagaggttggcgaccttcctgtaaacattacatttatgatggaaggggctgaagaatctgcatcaaccgatcttgaaaaatatttagataaataccgtgatgatctccttccagcagaccttttggtttgggagcaaggaaatcgaaatagtaaaggtcaattggaaatcacagggggcaacaaggggattattacctttgatttgtcggtcgagagtgctgatgttgatatccactctaaatttggtgccgtgattgaatcggcttcatggtacttgctcaatgctatctcaagcatgagagatgaccagggacgtatccttatcgacggtatctatgaaaagattgtccaaccaaacgaacgagagatggatcttattgaaacttatgccattgaaaatgcagatagtcttcgtaagatttacggcttaaaactacccattttagaaagtgaccgccgagctttcttaaaaacttactattttgaacctgccctttccattgaaggcatttcaacaggttatcaggggcaaggggttaagactatcttgccagctcaagccagagctaagatggagatgcgtttggtccctggcttgacgcctgagtacgttttggagtgtatcaaggcacacctcaaaaaagaaggatttgaccgtatcaaggtaaccttcactcttggtgaagaaagttatcgaagtgatatgtctgatccagctattgtcaatgttattgagttagcaaaaggcttttatgaagaaggcgttgctgtgcttccaacggcagcaggtacagggcctatgcatatgattcatcaggctttgggtgtaccaatggcagcctttggcatagggaatgctaatagtcgtgaccatggtggggatgaaaatgttagcttagcagattactacacccacattgaactaattaaggagttaattgcaagttatgagtaatgtcattattgatttgaaaaatattgatatcacctttacgcagaaacgccgcactattcaagcggttaaggatgtgtctatccagattgaaaaaggtgatatttacggaattgttggttattcaggggctggtaaatctacccttgttcgtgcaatcaatcttttgcaagtgcctactgctggtaaaatcactatcggtaaagatgtgacttttgcagatggtaaggtccaattgtcgacaaaagaattgcgtcagaaacgtcaaacgattgggatgattttccaacactttaaccttatggctcaaaagacggcttatgaaaatgtagcctttgctcttcgtcattctaaactaagcaatgaagagaaagacaaaaaaattcgtggtcttttggaattggttgatttggctgatcgtgcggaaaactatcctgcacaattgtcaggtggtcaaaaacaacgtgtagcgattgcgcgtgccttggctaatgatcctgaaatcttgatttcagatgagtctacatcagcccttgaccctaaaacaactaagcaaattctttcgcttttgcaggatttgaataaaaagcttggtttgacggtggttatgatcactcacgaaatgcaaattgttaaagatatttgtaaccgtgttgccgttatgcaaaatggtcaacttttggaagagggcagtgtccttgagatcttctcaaatcctcaagaagatttgacacaagaatttattgaaactgcagcagggattgaagatgccttggctaagattaatgcacaacctttggtgaaaaacttaccaagctcagcccttctcgttcaacttaaatatgctggttcttcaacagatgagccactcttgaccgaacttttcaaagagtacggagtttcaagtaacatcctttatggtaacgttgagattctaggtgatactcctgttggtgaattggtcgttgtcttggatggtgaagcggatcaggttcttgctgctcaaaaagcgattgaaaatgcaggtgtcagcttgcaagtacttaagaaaggagcccaataatggcagattggattcaacaaaactttccagatatttatcgtatcggtatgcagggggttaattcttggccagacgctatctatgcgactctctacatgacggttatttccttcatcattgggggacttcttggtcttgttatggggcttttcttggtattgacaggtcctcgtggcgttattgaaaataaatttgttttccaaatcttggataaaatcacctcaatcttccgtgccattcctttcatcatcctcttggcgattttgaaaggcttcacttactttatcgtggggactaaccttggtatgacagcggccttggttccattgtcagctgcgactttcccattctttgcacgtcaagtacaggtggtacttgcagatcttgaccgtggcgttattgaagcagcacaagctagtggtgcgacactttgggatacgattaaggtttaccttggtgaaggtctacctgagttggttcgtgtatcaaccgtaactctgatttccctagtcggtgaaactgccatggccggtgctatcggtgcaggtggtcttggttacatcgccatctattatggatataaccgttctagtacatcagttaccattttggcaactttcttgattttgattttgattttccttatccaattcttaggtgatttcttgacacgtaaattgagtcataaataggatttgagagcctgtttgccacaggcttttctaatgtcttgacgatttcagatatttatcatagtatggaagctatcgaatgctttatggttgactaaccataaaaaaggagttaatgagttatgaaacgttttatttcaacttggaatagaaccagtctaattaagcgcattgccattggtgtggtagtgggtgctgtgcttggtttgcttgttcctaagtttacggttattggtctcttaggagacatgtttgttggtggtttgaaggcaattgccccacttttggtctttgccttggttgccaatgccctttcccaaacgcgagaaggtcaacaaagcaacatgaagacagttattgttctttatctctttgggacctttgcggctgctttgacggcagttatttctcactatatttttccaatttctctgaagttgggagcagctgcagcgactaaagcgacagcacctcaaggtgtgggagaagtctttaaagatttattgcttaagatggtggataaccctgtcaatgccttggctcaagctaactatattggtgttttggtatgggcagttgtctttggttttgccatgcgagcagctagcaatcacacgaaggatttgcttaataccttggcagaagtgacttcacaaatcgttcgttggattatcaacttggccccatttggtatccttggtcttgtctttaatactatttctgagaatggtgttggtgttttggcagattatggggtcctaatccttgttttagtgggaacaatggcctttgttgccttggttgttaatccaatcattgcttttgtgatgatgggcaaaaatcctttcccactagttttccgttgtttgaaagactctgggattacagccttctttactcgctcgtcagcagccaatattccagttaaccttcaactttgtaaggatcttggtttgaatcctgatacctattcagtttctatccctttggggtcaactattaatatggctggagcagccgtgacaatcaatgtcctaacgcttgctgcagtaacgactttgggaattcaggtcgactttgcgacagcactcattcttagtgtggtttcagctatttctgcttgtggtgcctcaggtattgctggaggatccctcctattagtgccagtagcatgtagcctctttggtatctcaaatgatttggccatgcaggttgtcggtgtcggctttatcgtaggtgtcattcaagactcttgtgaaacagcccttaactcttcaacagacgttctctttacagcagtagcagaaaagagccgttggaagaaagcatagctaattgtataaggtcggcctatttggctggctttttgattttagagaaaacatagtcaaagactatagctagctcaaggatctatcatctttaaaaagcccataaaatatggtaaaataaaccgttcaaagagaaaaagtgaaacatttatgactaataatttattggtgcttcaatcagactttggtttggttgatggtgctgtttcggccatgattggtgtggcccttcaggaagaacctagtttgggagttcatcatctgacacatgagattaccccctacaacacttttgaggcttcttatcgtctgtttcagaccgttgaatactggcctgaggggacaacctttgtttcggtagttgatccgggtgtaggttcctcacgtaaaagtgtggttgccttaacaaagacggggcaatatatcgtcacaccagataacgggacactttcttatatcaaaaaggttgttggtatcgtggctgttcgtgagatttcagaggttgagaatcgtcgtagcaatacagaactttcttataccttccatggtcgtgatgtttatgcctatacaggggctaaattagcttctggtcatatcagttttgaagaagttggtcctgagttacctgtggataaaattctagaacttccagtggttgaaaccatcatagaggataatttggttcgtggggcgattgacattttggacgtccgtttcggctctctgtggacctctatcacacgtgatgacttttacgcgttggaaccaaactttggtgatcgattcgaagtaaccatctttaacaatgatatgttggtctaccaaaaccaagttacctatgggaaatcttttgcggatgttcgtatcggtcagccaattatttatatcaattccctctatcgtgttggcttagccattaaccaagggtcttttgccaaggcctataatgttggcgtagggtctaactggcacattgaaattaaacgtttaggagattaaagtaagattatgaaaaataattcaattcgtacagtagttgcgacaggtattggtgcagcactctttattatcattggtatgtttgttaatatccctatttttgggaatactagcatccaacttcagtatgctgttcaagccctattctcagttgtttttgggcctattacaggtttctttatgggctttattgggcatgcgcttaaagatggcattcaatacggaaatatctcatgggcttgggtacttgcaagtgctattacaggtcttgtgattggtctatttagtaaaaaatatgacgtcacaactggcaagttctctttgatgagcatgatttggtttaacctagcgcaagcattggctcttcttattgcctatggtatcgttacccctattggtgacagactccaatttgcacaagcttggtcatacctttatgcacaaagttttgtagctggcgtagctaactttattacgattgcgattgggggtaccctccttcttgctatctatgctagctcacgtacacaatctggtagtcttaccaaagactagtataagttataggagagtgggattgtcagcttattgtgatatctcctctcttttttagtagaaacatggataaatacattagttttaatcagtttacatttcaatatgatgcgcaagcagaatcgacccttaaagatatcagctttgatattgctaagggcgagagagtccttatcttagggccttctggtagcggaaaatcgaccctggcccagtgtctcaatggtatcatacctaatattcatgggggcaaggcacaggggcaggtaaggatagatggtcaggatatttttaagcaatctatctatgataagtcacagttggtatcgacggtattgcaggatccagatggtcagtttattggcctaacagtagccgaggatttggcttttgccttggagaatgattgtgctgatcaaagtgagatgaaagataaggtagccctttgggctgagcgtctagacttgacctcccttttgaatcaccgccctcaagatttatcaggtggccaaaagcaacgagtcagtttggctggtgtcttgattgatgagagtcctattcttttatttgatgagcctctggcaaatttagatcctaaatcaggacaggaaaccattgatctcattgataagatccacaaggaggtgggagctacgacgattattattgaacatcgcctagaagatgttctttatcgtcccgttgaccgcattttactggtcaatgaaggagagctcctctttaacggtagcccagatgagcttttatcgagcaaactcttgctagaaaatgggattcgcgaacctctatatgtgacggttttacgtcagttgggatttgacacaaggcgtgcacaaaatcttagtcaattggatgctttagacttatctgaccttgctctgccagacagagttttgaaggataaaagagacagttcgagtgactctattttgaaggttgaggggcttagtgtttcctatggagataatccagcaatcatagaggatctgtcctttagcttgaaaaaaggtgagcgactagcgattgtcggtaaaaatggggctggaaagtcaacgcttgccaaggctctatgtggttttgtcccaagtcaaggaaaattgacttacaagggtcaggatattagccaagatagtattgccgagcgttcagaacgtataggctttgttctacaaaacccaaatcagatgattagccaaactatgatttttgatgaggtggctcttggtttgcgtttgcgaggaattgaagaggctgaggttgaagagcgtgttcatgaggtcttgaagacttgtggtctctatagttttcgtaactggcccatttctgcgctttcctttggtcagaaaaagcgcgtgaccattgcatctatcttggttttgaaacctgaaatcattatcttggacgagccaacggctggtcaagattacaagacttacacagatatcatgaatttcttggacagtcttcagaagcaaggtcatacgattgtgatgattacccatgacatgcagctcatgttggaatatagcgatcgttgtctcgttgtagttgaaggtaaaatcattgcagacgacaaccctgttacaattcttaatcagaaggatttacttgagtcagctaatctcaaacagacctctctttatactttgggtcagaaattgtcaagtgatccagtagaagtaacccagtattatatcgaaaaaggaggccctaatgtctaatcgtttaattggttatcagtcaggtcaaggtttcctctatgatttgtctggggcaagtaagatgcttttctttatcatggtttcagttgcctgtatggcaacctatgacccacgctttatcctagcagtaggcttactttccatttatctcttttatttggctaagattcgttggagagatatttcttttgttgttaagattattggatccattgccctctttaatttacttatggtctaccttttcgcacctggttatggtgaagaaatttacggggcaaagacagttctgattgaaggctgggggcgtttctatctaaccagccaggagcttttttaccttgcaaatctattgctcaagtatttttcaacggttcctcttgccatcctatttctcatgactacccatccaagtcagtttgcggctagtcttaatcagattgggattccttataaatttgcctattccgttagtttaaccttgcgttatattccagatgtccaagaagaattctttacgattcgtaaggctcaggaggctcgtggtttggatttgtcgcaaaaggcgggattggtcaaacgtattcgtgggaatctccaaattgttcttccactaattttttcatctctcgaacgaattgataccatatcgacagccatggagttacgtcgatttggtcgctacaaaaaacgtacctggtatgtgcataaatctttgatgaaacaagattatcttgtcatcgtgtcagctattcttttattgggaattagtataggattaatcttcctcaatcatggtcgtttttacaatccatggggataatattcttggcttttagtaaaagtatgcagataagcacaacaaaaaacgttccagtcttgtctagatgaacgagattggaacgttttttgttatttcaaatatcctaaataatcaaatttttctagtgttcgattgtcagcaacaactagtatgattccttcatcaggtagtttcttacttgggtcaaagtgagtgtttaacttgccatttttctcatctctaaaaccaataacattgacgttataattttgtcttagatttaaagtatgcaaggactttccagcccattcactaggaattttaagttcaattagagctacgtcgtcctctaaatgaaaaacatttgatatgttatagcggaggatatttgaagccaattcttttgctgtgctacgttcaggagtgatgacccagttagcacccattccgtataggacttcctcataattgttattcgtagctttggcaataatattcttaataccaagttttttgcactgcaagagcgctagcgcagacgattctaggtgttctccagttgcaataatgactgagtcacaagtatcgataccagcagaacgtagaaattcaatgtcagtaatgtccccaacagcagccttagtcacctgatcagcaagggaatcaattgttgtagcattattatctaaggcaataacatcttgtccaaaagaagagagttcggttgcaatagtttgtccaaagattcccaaaccaaggaccccaattatttgtgttttcatatacaatcctttcagaatattatcaattaataaaataggttagccgactgaaatgtcagttggggcataagagatatgtttttcttttttggtcatcaagctcaagagaacagtgataggtccgacacggccaatgaacatcagagccatgataacgaggcgtcctagggtatttagattaggggtcaaatccattgaaacaccaacggtagcaatggctgacacactctcaaaaagtaggcctagtggtgagagagtaggattagtttccagcaaaataacatagccgacaaagagcatcgttaggacaaagagtataactgtgaatgcttgcaaaatggttttgttagatataatacggtttcgaaaaaccacactcgagttaccagatagctctgacttaaaaagtaggaacatgatagaggcagttgtcaccttgataccacccgcagttcctccaggaccacccccaataatcatttgaatcataaaaagaagatttgtggagaaatcggcattggtataggaaatagttgcaaagccagcggtacgcatggttacagtctgaaagaaacttaccagaagttgttgccagacattgagagtaccgattgtcttagagttatccatttccagtaaccaagcaagcagtgttcctcctaataggagacaacctgtacttataagcacaagacggctttgattactgaaaggtctccaagctaatttccaattccttggacgatttttaatataacgtcttattagttgaatcaaatcaatccaaactgcaaatcccaagcttccagacatgatgagaaaagctacagcaaggttaatggttggattggttgcataatcttgtaaactgttagaacctaagttatcaaatccagcattacaaaaggcagagacagctagaaagagactattaaaaatgccatgaccaagtccaaaacgaggaatgaagtcagtcataatcacgagtgctgctaaagcttcaatagaaaaagttattttatagaccttaaaaagataagccttcaaatctttttggttatccctactaagtgcggattgaaggagatcttgatcgctcagtcctaatttatttttaagggtataggtactaaaggctataagagagactagtccaagtcctcccgtctgcatgagaaacatagagagaatttgaccaagaccattgtatgccttactgaccgggacaacagaaagtccagttacacagaccattgacacagtattgaagagatggtctaggtagcttgtttctggactgttagcatagtggcttatgggaaggctaagtaaaatactccccactataatgacaaagacaaagctgagcacaagcttttgcgtgacagaaagacgatttatcaatgaaaacctccgagttatcataagaataaataataatccaaggagcaagaagcatccttggataaatgttataacggcttcttgttaggcatcccagcacgacgtgggtacttatttggggtttcttttttcttatcgacaatggtgatattacgtccatccccatttggcaatttatagttctcattgagaataggtttggcaaaaagcaagttcaaggcatttttagcatcggctagctcttcgtcagctgctgcagctttaagtgcaataagttgtccacccacctttaagaaaggaatggtcaattctgagagaacctgcatgcgtgcaacagcacgggcagttacaatatcaaactgagcacggaagcccttgtcttgtccaaaatcctctgcacgtccatgatagaagtgaacaccgctgagctcaagttcatcggccaatagatttaggaaattgatgcgtttattaagagagtcaatgatagtcacatcaagctcaggacaaaggattttcatagggagacttggaaatccagctccagctccgatatcgagaagtcgaatagtctgatttttaatatgtccttggagaacaggagctagggaatcgtagaaatgtttgaggtagacctcgtctctttctgtgattgcagtaaggttgatcttttcgttccattctaccaagagctcaaagtagcgttggaattggtctttttgtttttggctgagatcgaaccccagttctttcagagccttgtaaaaatcttcaggtgtcattttatattccttttatctagtttcaatgctcttattttaccataattaagagctttcatctaacgctataagacagatggaaactaggtctgaataagtttctcattagctgtgaaaaaagttctaagtttaagaaatatgtaatattaaaggtgttattttttcttaaaaatttgatataatactaattaagtctaaaatcataatcatgctctctaatgaaaagtgaatgtaggggattgtggtcttgtggatttgaaaatagatccctatggggaaattaatttgaggattaaaaatgatttacctttcagaagttagaaagtctccagaagggctcgcctttaacgaagcaccttctttgttggagtctattaaagaacgctatgatcaagttttaaatcttgaacagattcaagcaagtgggcaggtagcctatgacaatggtttgtaccttttggattatcaactcagctatgatattaccttgccatctagccgttcacttgaacctgtgacccttagttttaactatccggtttcagaaacctttatacaagaggcagatgctgctcttcaaaaagaattagtcgaagaaaatttagttcttatcttagatggggacaccattaatcttgatgagagtattctagataatattcttcttaatattcctttgagagtattaacacctgaggaagaatcaggccaaatttcgctctctgggaatgactgggaagtcttgtcagaagaggactttgccgcacttcaacaggagaaaaaagaggcaagtaatccctttgcccaattgaacggtctatttgacgaaaattaattcaaaaaaacaaactaaaaatgtttgacaattttaaaaatctatattattatatcattagaagttaattttcggatttattcattgggtagatctacagactttttaagggaaatggaagtcaaaaaattttaagaaagtggtaaatacttattatgagcaaacgcattttgattgttgaagatgagaaaaaccttgctcgttttgtctctcttgaacttcaacacgaaggatacgacgttgtgacagcagacaacggacgcgaaggacttgaaatggcactcgagaaagattttgatcttattctcttggaccttatgttgcctgagatggacggttttgaagtaacacgtcgtctccaacaagaaaaagatacttatattatgatgatgacagctcgtgattcaatcatggacattgttgctggtttggaccgcggtgctgatgactatattgtaaaaccatttgcgattgaagaattgttggcacgtatccgtgcaaccttccgtcgccaagatatcgaagctgctaagaatgcaccagccaaagcatcaacttatcgtgatttgaaattggatgttcaaaaccgtacagttgttcgtggtgatgaagcaattccattgacaaaacgtgagtttgatttgttgaacacacttttgagcaatatgaaccaagtgatgacccgtgaggaactcttgcttcaagtttggaaatatgatgacgccatcgaaacaaacgtggtagatgtttatattcgttacttgcgtggaaaaatcgatgttccaggtaaggaatcatatattcaaacagtacgaggaatgggttacgttatccgtgaaaaatgagtaaattacaagataaattatttggtaaagtaaccattagaaaaaagttgaccatgacaactgctgtggtcttctttcttgtattgtcgatgttcactctggttgttattttctcagccaatacgctacttttacaacgtgaacgtcaaaatgtaaacactacaatctcaaaagttgttacttatatagaaaaggactgggactccgacgaagagttgagtccagaaccgcttttagctgccctttattcgcctaaaaatatctatgcatcgatcattaatggcgtgctttccgaaaagcactctttggatggtcaggttgcgatttctaataaattatattctaaccaatctgtttttgtttatgacaaaaagggaacgtttatctttacttctgaggagaacacagattcgcctccaggtatgtccgaggtaaacaaattgaagtcagtttcctataaagggaagcgtggtttcttgctgcaagttccaatctacggtaaagataaaaagaccatcgttggttatgcccaaattttccatgatttggaattctactatgcccttaaggagcgtttgattttcttattgattttcctagaagtggggatgacggtcctagttatcgcagcaactgtagttgtcttgacatctattcttcgtccgatgagacagttgcacgaaacgatgggagtaatcaccgattcgccaagtgatttggaacttcgttctaagattgaaagtcacgatgaaattggtgatttggcggttaactttaaccgtatgatggataaaatccaagaaaataatcagatgcagatgcgtttcttgagtgacgtcagtcatgaattgcgtacgccgattgcggttattaaggggcatatggacctcttgcaacgttggggtaaaaatgaccctgagattcttgaggaaagtcttgaggctgccagtcacgaggccaaccgtatgacgattatgattaatgacatgttggattctatccgtgtcaaaggatcatttgaaaatcacagaaacgatacttgtgatttgaattcttcaatccgtacggttattggtaatttccgtgtcttgcatgaagactaccaattctatctcaatgatttcgagagctcagagcgccctgcacagatttacagccaacactttgaacaggcgattacgattttgattgataatgcggtcaagtattctcctgttaacaaggaaatccaggttacaattaaggctctggaagatgaaatgttggtgcaagtgcaagataatggtgaagggatctctaaagaagatattgagcatatctttgagcgcttctaccgttcagataaggcacgtaaccgtacgacaacgcaatctggtgttggtattggtttgtcaatcctttaccaaattgtggaagcttatcgctgccgtatcgatgttagttctgaacttggtgttggaacacgtttcgacctttacattccatttgcagatggagaaacgacgacacctcaacttgagctttaaatcaatttataagagacttagagtggttcttggtcatgagcacgcctcgtttagggcgtgctttttatgtgtttttatggtaaaatagagtaccgaatttcaaagattggtggtgaagtgcatgcgttgtccaaaatgtcaacataataaatctagtgttatcgatagccgtcaggcagaagatgggaataccattcgtcgtcgtcgtgagtgtgattcttgtcatgctcgttttacaacatttgagcgtgtggaagaagttccacttttggttgtcaaaaaagacggtactcgtgaacaattctctcgcgataagattttcaatggtatcttgatgagtgctcagaagcgtccggtttctagtgaggatatcgaaaatgccatcacccgtattgagcaaaacattcgccgtaaccatgatggagaggttgatagtgatgtcattgggaatttagtgatgaaagaactcgctgaccttgatgaaattacttatgtacgttttgccagtgtctaccgttctttcaaagatgttgatgagattgaagagttgcttcaagaaatcaccaaaactgtacgtgcgaaaaaagagtctaaaaaatgagacctattgaagaatttgtctatgttggcaatcaggttatcgttcccgatcaggcaagtttgatgcgttgctattatcccattattgggagtgaaggatacgctctctaccagtatttcgtggctttttatgacaatggtaatcaccgccataagtttgcggctattctgaaccatcttaactttggaatgcagccccttcaggaagcactggcggttctgacagcagtagatctcttggccttttaccagtcacctcaagggttttatgttatagagcttaagtctcccttatcaattgagcagtttctaaaacatgccgtttatagttcacttctcgagcaaaagattagtgaaccagcagtagacgctttgaaaccggcaggtctacaaggcttgcaagatttatctaaacgtttttcggatgtctttaccgatgagcgtttggctcaaaagtctgtgtctgaaatcaagcctaaaaattcatttgatttaagcagtttcaggaatcgtatgcaggctgatgggcttgtatttaaagatgaaaagacagatgtgccagaaatctataaattgtctgaaattcatggcatgaattggtatgatacttatctcttagctaagaagacagccgtgaaccaccagattattgtcaagcgtatgcaggtgcaattagagcaggctcaagctcaaacattgggtggtgattctgctttgacggagacggagaaaaagattcttaaagcggttaggtccgaaaagcctatagattacttgcaaagtgctaaaggcccaagcgggactgtgactaattctgagaagcagattctcacggatttggcacaaagaggctttatggatgaggtcattaacctcatggttgcctatagtttgggacggacacgttcaacgaatgtgaaccgagagtatatctctaaacttgccaacgattttgcctttaagaagattatcactgcagaacaagggcttttagccttgcgtagtggttacgataagaaatcacagcaagcaaaagctgaatctaagaagaaaacaaatgtgccaagctggagtaatcctgattacgataatcagaccagtcaggctgatcaggccaagttggacgagattagacgtcgggctttggccaaactagaaaaaggaaaggagtagcctatggaaagagttggacaaaccctaaatcgaacgggacatcatgggtctggcaatgcaacagatttaactaagcaaatcttggcggatccgagagtggctagctttattcaagagcatagtctaagccaggatgaaattaagcgtagtctacctaagtttaatcaattcctagtggaatgccgtaaggtcaaagaaggtgatgcctcttatattgctaaagggtatgagccgattctgaccatgaatgagggctacgctgacgtaacctataaggaaacgcgtcaacttaaagagcaacaagaacagcaggctattgctaaacggattaatttggtgagtctgcctcagtcatatcgtaagattacctttgcggacattgctctagatgatgtggctcgtgttgatacttttgagagtcttgtggattttgtggcgaattaccctagtccagaccagaaaggcctttatatctacggagacatgggggttggaaaatccttcatgttggctgctatggctcatgaactttcagagaccaagaaggttgctacgaccattattcattacccatcatttactattgatgtaaaaaatggaatcaaggatggttcagtcaaggaacaaattgatgctgtcaaacaggcggaagttttggttctagatgatatcggtgcagaacaattctcttcttggattagagatgatgttttgcaagttatcctccagcatcgtatgattgaggagctgcctaccttctttacgtctaactatagttttgcggatctagaagcgaagctatccaatggacgtcaaggagatgagacttggcaggccaaacgtgtgatggagcgtattcgttttcttgccaaagaggttcacttgaagggtgttaatcgccgttaagttgaatctattaataataaagaataagagagtttgctttccttggtggaagtaagactgctaaatgaagaaaggaatccctatttaatcagggacttaaacatatgacattacctacagttgctatcgtgggtcgcccaaacgttgggaaatcgaccctatttaaccgaattgcgggtgaacgtatctctatcgtcgaagacgttgaaggggtaacacgtgaccgtatttatacctctgctgaatggcttaaccgtcagtttagcttaattgatacaggtggtattgatgatgttgatgcaccatttatggaacaaattaagcaccaagctgacattgccatgactgaagctgacgttattgtctttgtcgtttcaggtaaggaaggcgtgacagatgcggacgagtacgttgctcgtattctctataagaccaacaagcctgttatcttggcggtaaataaagtggataaccctgagatgcgtgcagatatctatgatttttattctcttggacttggtgatccttatccagtttcatctgttcacggtatcggtacaggggatgttctcgatgctatcgttgaaaacctcccaacagaagttgaagaagaaaatccagatatcattcgttttagtttgattggacgtccaaacgtcggaaaatcaagcttgattaacgccattttgggtgaggaccgagtgattgccagcccgattgctggtactactcgagatgccattgatacaaactttgtggacagtgaaggtcaagagtataccatgattgacaccgctggtatgcgtaaatctggtaaggtttatgaaaacacagaaaaatactctgtcatgcgttcaatgcgtgccattgaccgttctgatatcgtccttatggttatcaatgccgaagaaggtatccgtgagtatgataagcgtattgctggttttgcccatgaagctggtaaagggattatcatcgtagttaacaaatgggatacgattaagaaagacaatcataccgttgctaactgggaagcagatatccgtgatcagttccaatttttgagctatgcaccaattatctttgtatcggctgagacgaaacaacgtcttaacaagttgccagagatgattaaacgcatcagtgagagtcagaaccgtcgtatttcatcagctgttttgaatgatgttatcatggatgccattgccatcaacccaacaccaactgacaaaggaaaacgccttaagattttctacggcacacaagtttcggttaaaccaccaacatttgttatctttgtcaatgaagaagagcttatgcacttctcatacatgcgtttcttggaaaatcaaattcgtcaagcctttggttttgagggaacaccaattcatttgattgctcgtaaacgtaaataaaaaagagaccaaccagaatagaatctttatgggttggtcttttatcattgtaaggagaaaacgatgttagaaaatgttcaagcttatttgtcaaaacagggagttaagtatatcaaacctgaaaaagccggtccacataaggaagagatggaagacctcaaggcacttggtcaagcagctcgtaaggagatgcaggctttagcaaaacttctagaggagcgtttggcaccctttaagatggatcgtgtcagtaattgggctaatcaagcacaaatatgccggccacacttttggtgctattacagggcccctgaggatagtttagacgatgttgccatggcgattcgactttatggtcagcctgaaaaatgggggatttcagtagaagttagctttgtcgaacgtaaaaaatcagataccactctagctaagcaacataaggtcctagacttaccgattgcaccctctctatactattttgctcaggaaaatggtgttagtcatcgtgtggaaggaacggaagagaatcgtcagatgcttaaagaagcaattagagatggtcgagttcgtaaggtgttggtcaagtatgatgtccctgtgactgctagtgaaacaatggaagagttggtagaagaactcgctgatgggttctataagttgaaaccatactatgaggaagctaatcaaaactaaaaaaatctccagttttttctggagatttctcttatttattttggtgaaatcacttcagcaccacccatgtaaggacgaagagcttcagggatagttactgaaccatcttcgttttggtagttttcaaggatagcggctactgtacgtccaacagcaagtcctgaaccgttaagagtgtgaagaagttttaccttaccatcggcttcgtcacggtaacggatttgtgcacgacgggcttggaaatcttctgtgtttgaacatgaagaaatttcgcggtaagtgttttgtgctggaatccaaacttccaagtcgtaagttttcgcagctgagaatcccatatcgccagtacacaaagtgatgacacggtatggcaagttaagtttttgaagaatgttttcagcgttaactaccattttttccaattcatcataagagtcttcaggttttgagaatttgaccatttcaaccttgtggaattggtgaagacgaatcaaaccacgtgtgtcacgaccagctgaaccagcttctgaacggaatgaagggctcatagctgtgaagtagattggcaattctttaccatcaaggatttcaccacggtagtagtttgtcaaaggaacttcggctgttgggataaggacatagtcagtaccgtcaagctcgaaagtatcttccttgaattttggatattgaccagtaccgaacattgagtcgtggttaaccatgtaaggtgtgatcatctcagtgtaaccttctttagcgtgctcatccaacatgaagttgtagattgcacgttccaattttgctccaaggcctttgtagaagaggaagcgagaaccagtgactttagcaccacgttcccaatctaggataccaaggtcttccccaagatcccagtgtgctttaacttcaaaatcaaagtcacgaggtgttccccaacgacgaacttctacgttttcgtcttcgtcagcacctactggaacagagtcatttggtgtgtttggaagtgttacaacgatggcattaagcttttcatcgatagcagcaagttctgcatcgatttccttaatttctgcagagactttttgcattgctgcgatttgtttggaagcatcttctttgttacgcttagcttgagcgataccatctgaagcaatgttacgttgagctttgagttcttcagatttgataagaagttcacgacgtttaacatcaagctctttaagttcatttaaagtttcagcagcgacaccacgtgtagccaatttttcggcaagggcatcgaagtcgttacgaatacgttttacatctaacataagttcctccaaaaagtaaaacactccagtgaaagtgttggagtgacataggccacggttccatccaacttcacaggagtgcacttgtttatgtttttaattattagaaacggtagaatttcgtaggttaaccctacctgctcgcagcaaccgcaggctttctgtaagggtctagctagtacttatccgtctgttatattatacaaaaattatgattttttggcaaataaacctttgagtcgagccccaatagtttgaatgagagttggtagcttgacgactttttcattgccaaggtgttccctagcaatttttagaatcttcccagaatctttagaagcaaagaggaatttgctcttgtctgttaacacttcaaagtggcggctaattctctttcctgagacatttgcaccgatttgtgtgatgctagtccatggaatttgaatgtattgctcgacattgacatctgggtagaattcaagagccacatctccgattagaaatttaccgactttccctccgatagccatgtaggaaacgcctgttgtatgcaattcaactgttttgtttagtgattgtgccatatctatctcgctttttgattgtagtacttttattatagcataagaaaagagttcagctttgctaaactcttactcttttttacatgattccgaagaagcttgcaacaataccaactacaaagagtccgatgatgattgtgattggtgaaactttcttcttaagcaaccacatacatgcaaaagtaaggagaagtcccatcaaacctggaatcaatgaatccaattgtttttggagggtatcaacttgaatcttatcgaagctaagtttgtcattaacttggccgaggatagtcttaagttggtcaccgctaacattgcctttaggccattcgatataggcacctttagacaaaactttacctggaaggtttacagtgaagacgatagatacccaacgttcaacaaggacagccaagatgaacataccaaggattgatgcccctttagtaatatctttcaagataccaccagacatgtctttagtgatttctgaacctgctttgtaaccaagttcttgagtgtaccacaagaaggccatacggataaggttccaaccgatgaagaagataagtggaccagcgatgttaccagcttgtgccaatgatgcaccaagggcaccaaggataggacgaactgtgaaccagaaaacagggtcaccgataccggcaagaggtcccatcataccgattttaaccccttggatagcagcatcttcgatgtcagtaccgttagctttttcttcttcaagagccaaggtaacacccatgataggagcagctacgtaagggtgggtattgaagaattccaagtgacgtttaagagctgcggcttggtcttctttgttagtatagagttttttaatagcaggaatgagtgagtaagcccaacccaagttttgcatacgttcatagttccatgaaccttgcaagaattgtgagcgccaccaaacctttttacgatccgcttgagataattgaattttttcagccatgagagcaccccttcctagtagtcttccaagatatcgccgattgggtcgccagaaccagatgaagttccgccaccatttccgccaccttgtttagaaaggttgaggtagatgaaggcaatagcgacaccgatagcaccaagagcgataagtgtcaattggctaatagcagcaaaagcaaaaccgatggcgaagaatggccaaacttcacgagttgccatcatgttgataaccatggcgtaaccaacggctacgaccataccaccaccgacaaccataccgtggttgagccagtcaggcatcaatccaagggcatgttgaacagattctgctgggatagcaagaagaagggcggctggcacagcgatacgcaaaccttgaagaaggagggcgaggtagtgtgcacgttcaacaccagcaatgtttccactttctgcagctttatctgcggcatgaacaagggcaacagaggctgtacgaacaagcatagttaggaagagaccggcaaccgcaagtgggatagctgttgcagtcgcaacaccgataccttcagttgtgaagttaccacctttaaccaaaataatggcagcagcaacagaggcaagggcagcgtcaggagcgacagcggcaccgatattagcccaagcaagggcgatcatttgaagagaaccaccaagcatgatacctgcagtgaggttacctgtagcagcaccgatgagggtacatgcaacaagtggttggtggaattggaattggtcaaggataccttcaagaccagcaaggaaggcaacaactacgaccaaaattgcagaaataattgacatatctgacatggtaataattccttttctattgagttgtgattagctgagagtatcaactaatttatccgaatgaaggttattgaacgttagcttttttgataaggtcgaacaaatctttcttagaatcatttggtaccttacggacgtcgaattcaacgccaaggtcacgcaatttttcgaagcaagcgacatcgtctttgtccatagacaaaacgttgttaaccattgttttaccagttgagtgagccatagaaccaacgttaagttctttgattggcacgccaccttcgatagcacgaagtgcgtcttgaacagtttcgaacaagataagcgcgtgtgtgttaccaaagcgagggtccttagaagcatcaatcaatttttgaattggaacaacgtttgctttaaccccatttggtgctgcttgtttgatcaattctttacgaagctcatctttagcaacgtcgtctgaagcaacaatgatacggtctgctttagaagcaggtgtccagttagttgctacttgaccatgcaagagacgtgtgtccaaacgtgccaagttaatcttgagtttaccatctccgataactgtcccttctgggatagctccttgaggtgcagcagcttctacaggagctgctgttgtttcctcagctggattaagctcctctggaagtgccttgataccacccttagcttccttgatgatattagcagcaacttgctctgcagtagcgttagcatccatcatacgttcagtgtatgcttggataagcattggcaagttaagtcctgtgatgatagcaatcttgcgatctggattttctccagcaattcgactggcttggttaaatggtgaaccagaccaaaggtcagccaaaacaagaatttcatcatcagcatcgaattgtgcaatggcgtcgttgaagtgagcgtacaagtcatcaggaccttcacttggcatgaaagttacgacttgaactttctcttggtctccaaaaatcatagagcctgattggtggattccttcagcgaacttaccatggctggcaataataataccgatacccattcgtgttctcctccttataaattattttttcctaggcttaaaaagactatctccgatttttatcaagacgctaaaaaaaagcgtctctcaatctttttaaacataagaaatcaagaacaattatattgtaaaacgctttcacgcaaatgtcaatagctagtgagataaaatttcaaaagaagtcaaattctttcaaaaatgagcaaaatattataaaaagattgtccaatcattagattggacaacccttttataatattcggagattatttcttcttgacaatgagtcggaaaagatttttaaagccttgtttgaggacagcgataaagctaggtgcttttcgtaaactttctcgaggaattcttttttgaatttctttcaaagttattcggctttttcgactggcaaaacggaaacgtccattttgcttagtgcggatttcaaagcgtgggatgaacttaccaccgaagtagatatcggcaatcacataagtgatttcatcccaaggaatttgaacgtagtcttgcaacttcgtatcattgtaaaattcgaaggccttatctccgaccatgatatttccgtaaataggtccttcacgaaaccaagttcccttagttgtgtgagccattttcgtattgagcgatttaaccataccttgctccgattagagtagaccaataatgtggagcacaatagcaaggacaaagatacctaagatgataacgattggagaaacttttctcttaagaaggtacatgcagaggaaagtcaaaccaagggcagcaagaccaggaatcaattggtccaagttatcttgcaaggttgtcaccttgttagcgtcaagagagcgaccagcagcttgttgatggaaggcttctttaacaccggcaataccttttggaagtttatcccaatcgatataagcaccttcttgttgtttaacagtagagacaactggtgtgaaggtgatacttacccaacgttggataagagaaccgataacgaacatccccatcattgatgcgccacgagttacttgttgaagaaggttaccagatacgtcgtctgtaatcgcagcaccagctctataaccgaactcttgagtgtaccatttaacggcagcgaccatagcattccaaagtacgaagaagacgataggtcccaagatgttacctgaaacagccaaacctgctcctaatgaaaggaagattgggcgaagggtaaaccagaagagagggtcaccggcacctgcaagaggtcccatcataccaaccttaacccctgagatagcggcatcatcgatgtctgccccgttagcacgttcttcttccaaggcaagtgtaaccccaaagattgggttagccatgaaaggttgtgtattgaagaattccaagtgacgcttaagagcagctacacgttcttcttttgtttgataaagttttttgattgcagggatgagggtgtaagccacaccaccattttgcatacgttcatagttgaatgaagctaaaagaaagtatgagcgcaagaaagctttgaaacgatctgcttttgttaatttaatttttgaatcagccattttctttcctcctaattaaaagtcttccagaatttcaccgaggggatcacctgatcctccatcatttgaagaacccaatgaaccactagcttcaagtgcaaggtacataacggcaagacagaggccgatgatacccaagctaatcaaggtcaattctttgagggcagccaaagcaaaaccaaggaagaagaatggccatacttcgcgactagacatcatgttgataaccatggcataaccaacggctacaaccataccaccaccgattgtcatacctgatgttaaccattcaggcatagattcaagaccagattgtacaaggtgtgcaggaatcaagagcaagaggagggcagggatagcaacacggagaccttggagggacataccgataaagtgccatctttcaataccagcgatatcagcatcttcagcacgactatccataatgtgagcgatgaagacagttgcagtacggacaaacattgtcaaggcaagaccggcaacagccaaaggaaccgcaagggcgatggctggaccaattcctttagctccttgaccacccaagataagaatgattgtagaagctacagcggcaagtgaagcgtctggtgccatggcagcaccaacgttagcccatcccatagtgatcaactgcaagctaccacccaacattacgccgagttcgagatgaccagtaacaagaccgataagggaacaagccacaactggctggtatgtttcgatttggtcgttaactgagctacaaccgatgatgaaagcaacaattacgactaaaataatttgtactaaactcatttatgcatcctccaaaattatttcttctctgctaatttagtttcagctgacttaatcaaggcatcaacgtttgctgggctatcacttggcaccccacgaacgtcaaatttgacacccaatgattgcaactctttgatagcatccacatctgtttggtcaaatgaaagagccttagtaacgttgacttttccttctttataagctgaagaaccaaggttgatttctttaacatcaacacctgctttaacagcagcaagagcatcttcaacagattcaaagagaagcatagcacgtgtatctccaaaacgtgggtcattgtttgctttaaccatgtttttaattgggataacgtgaacttgaacaccagatggagcggcttgtttaatcatgtttgtacgaagtttatcatgacaaacagtgtctgaaacaacgatgatacggtctgggtgagttgagtgagtccaaccagtcgcaacctgaccgtggaggagacgtgtgtcaacacgagccaaaacgtatttgatttttccatcaccaagaacggttccttcaggaatggtacctttaggaatagaaggtttagcgtcggctggtttagtgtcttcttcaggaataaggccttctggaaggactttaacgccttcttttgtttccttataaatgttagcgacaatctcttcaaccccagcatcaggagctaccatacgttccgtatatgcttggataagcattggtaagttgagtcctgtcacgataaccatcttgcgatcaggattttcttccttaattcggcttgcctggttaaatggtgatccagaccaaaggtctgcaaggactagaatttcgtcgtcagcgtcaaattgagcaatggcatctttgaagtgaacgtacaagtcgtcaggaccttcatttggcatgaaagtaaccacttgaactttctcttgttcaccaaaaatcatagaacctgattggtgaataccttcagcgaatttaccatggctagcaataataataccgatacccattagtgttcttcctccttttatatattgtttcttaggaatagaaaaatgattattggtattagcattcatgacatgaaatgacaacaatatttttttagtccctcgaaaattagaacactctaattataggacgttaccatgaatttgtcaatagttttcgtaacaaaagtgtcatataattgaaaaaaacatcaaattattgcaaatatacttttttttcagacaataagtgttaaatatagttttaagctatatctaactagagaaaataggattaagaaaatgagataaatgcttgtaatagctagtgttggctgctataatttcttcaattaactatttaaggttaaatctataagaaaagagggcctccttatgtcagatttactaagtatttataaagaattgcaatctaagaaatgggttgacttgacccacaaaattaatgcggaaagtccacactttccagcactccctgctttgaaacaagaagaccttttcacattaaaagatggtttccatgttcaaaaatttacagtagttggtcaatacggaacgcatattgatgcaccgattcactttgtagaaggtggtcgttggttggatgagattgccctcaaagatcttcttttaccactctatgttatcgacaagtctaaagaagttgctgcgaatccaaactttatcttgagcaaacaagatatcttagactttgaagcagagcatggaaaaattactgaaggggcctttgtcgcttttcgtagtgattggtcgaagcgttggccagatcaagatgctatgcgcaaccttgatgaaaatggggttcagcaaagtccaggttggagccgcgaagctctagaattcttgattcatgaacgccatgttaaggctgtaggtcacgagacttttgatacagatgctggcattccagcagcagaacatggtttggtaaatgaatactacctcttggaacaaaacatttatcaggtagaagttttgaatcaattggatcaagttccagccgttggtgctttgatttcgattgcatttcctcactgggacaaggcgacaggctccccagtgcgtgcagtggctattttaccttaatcataagaaaaacaccgaagaaattttcggtgtcttttgttatttataaaaagagttcctggagtttgcgagcaacgccatcctcttcattagtccactcaatttgttcgttagcgtgggggagaaggacagagctagcattcttcatggcataaccagttttagcaagttccaacatctctgtgtcgttgtgttcgtctccaaaagcaatcagatcatccgttgatttgcgcatggccttaagtaagtagtttagggcgtaggccttgtttatgcctttaggtgaaaattccaagatattaagcggtccaccccaagaatcaacttcaatttcttccttgaagtccttcttgatgtcatcggcaagttggtacttatcctcatgacgagtttgcataaggagagcgttagggttgcgcgtgattttagttggttctaaacgcatagcctcaataattttatcaacaccaaagagttgtggttggatacgctctgggtgattcatagtgatatagaagtgttttcgatattcactagccagaaaatccatctctaattcatcatggcgttgtaagaggctaatcagatatttcttatctaatttaaccgaatgctcataagcccagtcttggtctggaagattggtcaaggagccattaaaagtgatgaggggtgtttctaaccctagtgttttgtaatggtcaatagccatacgataaggacgacctgtagcaataacgacttggtgtcctttgttttgtacgtctttaatcgttttttgtgtaaattctgaaatagttccatctgggcgcaagagcgttccatcaagatctagtgcaatcaatttttttgtcatgttcctattatagcaaaaatctgtcctttgttggtgattaagaaagagctttctaagaacgttcggtttttcataagaaaagtctcaggaaataaaccttgcaccgtcaaataatttcatgtagaatagtaatgttgcattctacgtgagaatgttccgaaattattcggattttgacaatattttttattaaggagtctaaactttcatggaaaagtttttcaaattgaaagaacatggtactgatatccgtacagaagtgactgccggattgacaactttctttgccatgtcttacatcctctttgttaacccagcgatgttggcccaaacaggaatgcctgcacaaggtgttttcttagcaacaattattggtgcggttgcagggacattgatgatggcattttatgctaacctaccatacgctcaagcgcctggtatggggcttaatgccttcttcacctacacagtggtcttttctttgggttacacttggcaagaggccttagcaatggtctttctatgtggtgttatttcattgatcatcacggtaactaaagtacgtaagatgattattgagtctattccaacagctctcaaatctgctatttcagcaggtatcggtgttttccttgcctatgttgggattaaaaatgctggtttcttgaaattctcaattaatccacatacctacactgtagcaggcaaaggtgctgacatggctaaggcttcaattacagcttcatcgtcagctacaccaggtttggttgctttcaataacccaactgtaattgtaggtttgattggtcttgcgattgcgattttctttattgttaaaggtattcgtggtggtgttcttctttcaatcctcgtaacgactatcattgctatctttgctggtgtcgttgatcttggaagcattgactggcacgcagctagcttgacatcatctattaaggatcttggtcaggtctttggtgcagcgcttggatctaagggattgggatcactctttgcagatgtttctcgtttgcctggtgtctttatggctattcttgccttttcgttgactgatatcttcgatactatcggtaccttgattggtactggtgagaaggttggtatcattgcttcaacaggtgataacaacgaatcaaaagctcttgaccgtgccctttactctgaccttgttggtacaagtattggtgccattgcagggacttcaaatgttacaacttatgttgaatctgcagcaggtattggtgctggtggacgtactggtttgacagctcttgtggttgctgtactctttgccatttctagtttctttagtccagtggtgtcaatcgttccaaatgcggcaacagcgcctatccttattattgtaggtgttatgatgctctctaaccttaagagtgtcgattgggaagacttgtctgaagctattcctgccttcttcacttctattttcatgggattctcatatagtattacctatggtatcgcagctggtttccttacttatactttggtcaaaatcgtcaaaggtcaagctaaggatgtccactttattatgtggattttggatatcttgtttatccttaacttcatcagtatggctgtgttctaaagcttgaaagtaaaaagtctgtacatttgtcaggctttttcttttgcgatttttatctggaggaatgtgagagagttactattggttaactttcaaatctatagtaagttttacaaaataatttctaatctatgagtattcgatgtggtcaaaataaatacaaaattaaaacacacatcttgatttcttacttaaatggttcaatatttataagtttctactgtatttttacagtggattctagtccatatttttattttttgatataatgaaaacatgatttacagtcaaaatgaagaagaattgattagtatcggccaaaagttaggtcgactgctcgattctggagatataattgttctctcaggtgatctgggagctggcaaaacaaccttaactaagggaattgccaaaggtttggatatttcacagatgataaagagtccaacctatactattgtaagggagtatgaggggcgactgccactctatcatttagatgtctaccgcattggtgatgatccagattctattgatttggatgattttctgtatggtgaaggtgtgacaatcatcgagtggggtgagctcctagacgagagtctgttaggggattatctcctaatttcgatatctcatcatggagatggacgtcagttgctttttgaatctttcggtcctagaagtaaggagattcaggaggaaatggtaaatggctgagcaagaattagtcattgaggaagctcaaagagaggatgctgcctctctagctcgtttactagagactgtagccttggaatcggattttctagcacaagatgatagaagttctatactgagtgctgaacagttagcatcttatattgaaggccatcagcataggcttaatgagatttgtttggtggcaaaactgggtcatgaggtcattggtgtttgtaatgttacctctgatcaagatactaagaccagtcatattggcgacgtatttattgcggtttctaaaccctactgggggaatggtgttggccagtttcttatggagacaatgattgactgggcagatcatacaccaactatccgccgcttagagttgacggttcaagcacgtaatgaacgggcggttcatctctatcaaaaatttggatttgacattgaaggcactaagaaacgtggtgcaagaactaaaaatggagaatttctagatgtttaccttatggctaaactcatagattaggaaaaaaacatgaaacttggacgaaaaattttattgatgttgttggcgatttttgcaacgacagtagtagctgctggtatttacctaacgacaacttataattacgccacaggcgaattgtcaaaaacctttagggcttctaaagcaacttcagggaatagtaaggctattcaacagactaagcctataactattctcttgatgggggtagatacaggatccaaagaacgtaaggaaacctgggaaggaaactctgataccatgattttggtaacagtgaaccctaagactaagaaaacaaccatgaccagtttggaacgtgaccttttgacagatattgaggggtcgggtgaagcaaaactaaattcagcatatgctgagggtggtgctgacttggccatttcaaccattcaaaaggttttagatattgatattgactattatgcactgattaatatgcagggtatgattgatttggtagatgctgttggtggtattgaggtaacgaatcattttgattttccaatttcgattgcagaaaatgaacctgaatttcaggcaaaagttgagcccggaacccataaaatcaatggtgagcaagctttagtctattcacgtatgcgttacgatgaccctgatggtgactatggtcgccaaaaacgtcaacgtgaggttattcaaaaagttgtagctaagctcttgaagatggactctattggttcttacaagaaaattttgtcggctgtaagttcaaatgttcaaaccagtatcgatcttggtgataccaatactttgcgtagcttgatgggttatagtgatgcccttaaaaatattaagtcataccaattggctggttcggatgccatgatcaatggaggaagctatcaagtagcctccactgaggatattcttaaggtgcaaaatcgcattaagcaggaagttggtaagaagaaagtttctgaatctaatcttaagactagtttggttctctatggttctggtagctctaactatggctcagatgatttcgttaattctaaaggaagtgcggcttcgagtgaggcatcttcaaattatgaggctgggccatctgaggcagctggtggtgggtcagtaagtacctacaatggaggtactacctatagcaataactatagtgaaaacacaggtaattatgttcaggaacaaggtacgacaacccctacatacaataataatggatcgggtgtgactacttatagcactgttccagcgacgcaataaataaggttgggtgattcccaacctttttgcttagaattgatagcaatatggttattccttgcaatggcttttgagctatgctataatataggaaaataacgaaagagaggcggagtagaaacttcgtctcttgtgtgtgtaaggaggtcataatgtcgcaaaaaattattgatctcgtgacggcagtcgtagctccagctattcctgagccatacgaactggtcgatatcgagtacgaaaagcttggcggtgactatgtcttgtcagttttgattgataagccaggaggtattactgtagaagatactgcagacttgactgaaattatcagtcccctcttggatactattcagcctgatcctttcccggatcaatacatgctggaagtttctagtccagggttagagcgtcccttaaaaaccaaagaagctttgacaaatgctgttggtcaatatatcaatgttagtctttacaaggctattgataagatcaagattttccaaggtgacttggtggcctttgatggggaaaccctaacaattgattaccttgataagactcgccataaaactgttgagattccctatcaaacagttgctaaagctcgtttggcagtcaaactctaaaactcttagtgtaaataaagaaaggatgccagttttagcctttagaggctaaaacaacaaagaatatgagcaaagaaatgctagaagccttccgtgtcttggaagaagaaaaacacattaacaaggaagatatcatcgatgctgtggttgaatcgcttaagtcagcctacaagcgtcgttatggtcagtcagaatcagctgtagttgaattcaatgaaaaaacaggtgattttcaagtttatactgttcgtgaagttgtagatgaagtctttgatagtcgtttggaaattagcttgaaagatgcccttgctatcagctctgcttacgagcttggtgacaagattcgttttgaagagtcagttgatgaatttggccgtgttgcagcgcaatctgccaaacaaaccattatggaaaagatgcgcaagcagatgcgtgaaatcacttataatgattataagcaacatgaaggtgaaatcatgcaaggaacagttgaacgctttgaccaacgtttcatttatgtgaatcttggaacgctcgaagctcaattgtcacgccaagaccaaattcctggcgaaagctttaagtcacacgacgtcatcgatgtttatgtttataaagttgaaaacaaccctaaaggtgttaacgtctttgtaagccgtagccatccagaattcatcaaacgtatcatggaacaagaaattcctgaagtatttgatggaactgtagaaatcatgagcgtgtctcgtgaagctggtgatcgtaccaaagttgctgttcgcagtcacaaccctaacgttgatgctattggtactatcgttggtcgtggtggaagcaacatcaagaaagttgtcagccgtttccacccaacacgtttggatgctaagacaggtattgaagttcctgttgaggaaaatattgatgttattcaatgggttgaagatccagctgaatttatctacaatgctattgcaccggctgaagtggactatgttctctttgacgaagatgatagcaaacgtgcgacagtagttgtaccagataacaaattatctcttgcaattggtcgtcgtggacaaaacgttcgtttggcagctcatttgactggttaccgtattgacatcaagtcagcttctgaatatgaagcactcgaagctgaaaaagctgaggctgctactgaggaagttgttgacgagattgttgcagaagatgctacacctgttgaagtcacaacagaagaagtaactgaaacaacagaaacagaataagaagaacatagaggtgtttgatggctaaaacacgaaaaatacctttacgcaaatcagttgtctcaggagaaatcattgataaacgtgatttgctccgcatcgtaaaaactaaagatggtgagattttcattgatccaacaggaaagaaaaatggccgaggtgcttacattaaattagataatgaagaagctctccaagctaaaaagaaacgtgcttttaaccacagtttctccatggatgttcctgaaagtttttatgatgaactcattgcttatgtggatcacaaggtcaaaagaagagagttaggtcttgaataacacagaaaaattgtcaaatatgttgggactagcacaaagagctggaaaacttatttctggtgaagaacttgtcatcaaggcagttcaatcagggcaggcgagactagtttttcttgccaatgatgctggtagtaacgtgactaaaaagacgactgataaatgtaactactataatatagaagtctccacagtgtttaacgcactggaattaagcatggctattggtaaaccaagaaaaacggttgctgtagttgatgctggattttcaaagaaaatgaggactcttatggaataaagaataggaggacatcacgtgtcaaagaaacgattatatgaaatcgcaaaagaggttggtgtagaaagcaaggttgttgttgcaaaagctcaagaacttggtctttctgtgaagagccattcctcatcagttgaagaagctgatgctaatcgtatcacttcaagtttaaaagggagaacagctaaggctgaaagcaagccagctcctaaagcgacaccaactcctaaagaggaaaaggtagcgcctaaggttgataaggtacctgttgccaaatcagctccagctaaagaaacatcaaaggctgaagtcaaagaagcccctgcgactccgaaaaaaccacaaagccgtaattttaaggcagaacgtgaagcacgtgccaaggcagaagcagagcgtcgtcaaaacggcggaggccgtgacaaccgtaatcgtaaccgaaatcaacaaggaaacgatcaaggtaaacgtcagaataataatcgtcgcaaccaaaatgtaaatggtcaaggcaaccgtaataatgggaaccgcggtaacaatagtaatcgtgaccgtaatttccaaggtaaacagcgcaatgatcaaggtcgaaataaacgtaacgatgctgcccgcaacaatcaggcaggtccacgtattgactttaaagcgcgtgcagcagccttgaaagcagagcaaaatgcagaatattcacgtcaaagtgaaacacgcttccgtgaagaaaaagctgcagagcaacgccgtgcgaaagagcaagaaaaggcaagaaaagaaaaacaacaggctgaagtcgctgctcaaaaagcagttgctgaagctaagccagctcccaagccagcaccggctgctcaaccagctccagctgcgcaagcacaagatacacgtcgtaaaaaggcacgtccagataaatcacgtgataatcgtcgcgagaatgaagatggacctaagcaaacaagaaataataagtggaataatcaaaaccaagtgagaaatcaacgaaatagtaactggaataaaaacaaaaataaaaaaggtaaaaataaccgtggtaattcagctccaaaaccagtaacagagcgtaaattccatgaattaccaaaagaatttgaatacactgaaggcatgacggttgcagaaatcgcaaaacgtattaaacgtgagccagctgaaatcgttaagaaactcttcatgatgggtgttatggcaactcaaaaccaatctcttgatggggatactattgagttgttgatggttgactacggtattgaagcaaccaagaaagaagaagtcgataatgctgatatcgaacgtttctttgttgacgaagactacctcaataaagatgctatggtagaacgtgcaccagttgttactattatgggacacgttgaccatggtaaaacaacccttcttgatactcttcgtaactcacgtgttgcgactggagaagctggtggtatcacacagcatattggtgcctaccaaattgaagagggtggtaagaaaatcaccttccttgatactccaggacacgcggcctttacatctatgcgtgcccgtggtgcttctgttacagatattactatcttgattgtcgctgcggatgacggtgttatgccacaaactattgaagccatcaaccactctaaggctgctggtgttccaatcattgttgcgattaacaagattgataaaccaggtgctaacccagagcgtgtaatcggtgaattggcagagcatggcgttatctcaactgcatggggtggggatagcgaattcgttgaaatttcagcgaagtttggtcaaaatattgaagaattgcttgaaacagttcttcttgtggctgaagtggaagaacttaaagctgacccaacagttcgtgccatcggtaccgttattgaagcgcgtttggataaaggtaaaggtgcggttgcaaccctccttgttcaacaaggtactttgcatgttcaagacccaatcgttgttggtaataccttcggacgtgtccgtgctatgaccaatgaccttggtcgtcgtattaagactgcagcaccatcaacaccagtttcaattactggtttgaacgaagcgcctatggcgggtgaccattttgccgtttatgaagatgaaaaagcagctcgtgcagccggtgaagaacgtgccaaacgtgcccttatgaaacaacgtcaacaaacacatcgtgttagtcttgataacctctttgatacccttaaagctggtgaattgaagactgttaatgttatcatcaaggccgacgtacaaggttctgttgaagccttggcagcatcacttcttaagattgatgttgagggtgttcgtgttaatgttgttcactcagcagtaggtgctatcaacgaatctgatattactcttgcggaagcttcagatgctgttgttatcggatttaacgttcgtcctacaccacaagcacgtcaacaagcggaaactgatgaagttgaaattcgtcttcacagcatcatctacaaggttatcgaagaaatcgaagatgccatgaaagggatgcttgatcctgaatttgaagaaaaagtcattggtgaagctattatccgtgaaaccttcaaagtttctaaagtcggaacaatcggtggcttcatggttactagtggtaaaatcactcgtgattcaagtgcccgtgtgattcgtgatggtgtcgttatttttgatggtaaattggcaagcttgaaacactttaaagatgacgttaaagaagtcggaaacgctcaagagggtggtttgatgattgaaaactataacgatattaaagttgatgacgttatcgaagcttacattatggaagaaattaaacgttaattttgttagctttaaaaaaagcttacttaggagacaaagctaggtcatctggcctggcttttgttccatcataataagagagaaaggataagactatgggaaattcatttcgtgtagaccgtgttggtatggaaatcaaacgtgaggtcaatgaaattcttcaaaagaaagttcgtgacccacgtgtgcaagatgtcactatcacagatgtacagatgcttggtgatttgtcagctgctaagattttttacaccattcattcaaccttggcctcagataaccaaaaagcacaaactggtcttgaaaaggctactgggacaatcaagcgtgaacttggtaaaaaattgaccatgtataagattccagatttgaccttcattaaggatgagtctatcgaatacggtaataaaattgatgaaatgcttcgtaatttggagcgtaaagactaagaaaaaattcctgtcagttatggcaggaattttgcgttataatagaataaaaaggaggacttcaatgaaagtaacggtctatttgggtgctaatatgggtgatagtcctagctttaagaaagcaacaattgccttgggtcagtggattgctaaaaatgggcataccctagtctatggtggcagtaagatgggacttatgggagttcttggtgatacggttttggaaaatggtggacaggctcatggcattatgccacaattcctcaaagatagggagatagcttatgaggggttaacctcaatgacgatagtagaaactatggcagaacgaaagactgctatgctagagcaaggagatctctttattgcccttccaggaggtctagggacactggaagaaatctctgaagctattgcggctgctcgagtcggtaagttggacaaaccctgtgttttcttcaatctcaatggctattatgatgctatgaaaacgatgttagataccatggttgctcatgattttttggaggctgaaacagcagcaaaattcctctttacagatgatttttcagaaattgaagctttcgtccagtcttatgaaccacctcaattgagacgttatcggtagtattgctttaatttgtaaaaatgagatgaattaaaaagattcaatgacacatcattgaatctttttaattaaatctttacaaatatttcttagcgacttcaatatcgccagcatagttatcacgtttaccatttacgatctggaaggcatcagcacctttaccagcgataaccacagcgtctttggagtctatagtctcagacattgctgttttaatagctttctctcgatcaacaatgatacgaacctcgcgactgatgtggctagcaatttcctgacagatagcaagaggatcttccttgttaggatcatcggctgttaggatgatatcaacatcagggtaggtattgaggacatgtccaaagtctttacgacggctttcacctttatttccaggagcccctagaattagactaatacgaccatcttgatggctggttacgacttgtaagagcttatctaggctatctccattgtgagcatagtcaacaaatgtcttagccccattagtttgggttagaacctccatacgccctggaacagaggtttgagcgattccttccttgatgtcttgaaggttagctccgagacgtaggcaggccagaccagcagccatagcattgtcctggttaaagtcaccgataagttggatatcatagtcaccggctaacttcccacttgccttaaagctaaatcctgagccatgtttaacagcattgtcggagtttttaccatagaagtcatgctctttatctgcaacttcttcagcaataaaatcaaagtgatccataccgctattaacgataacaactcgactgttttccaagaggagacgcttatggtagaagtagtcttcaaaggttgggtgttcaataggcccaatatggtctgggctgatgttaagaaagacacctacatcaaaagtcaatccatagacacgcttagtcagataggcttgacttgagacttccataatcagatgggtcatgccattagcaacagcttcagccatcatacggaaaaggtccaaactctcaggtgttgttaaggtagacttgaagaagttttttccgtctaatgtcgtgttcatggttgaaagcatagcaggtttatgactttgcttgagaatattgaaggcaaagtaggctgctgttgttttcccttttgtcccagtaaaagccagtaatttaagcttatcttgagggtattggtagaaggcctgagcaacgaggctcatagcctgcttaatatctgatacgataatggcaggtattcccacttgataatctttctcagccacgtagaaactcaagccagctttgacagcattctctaaaaattcaggcttgaaagcagctcctttggcaaagaagagggacgatggtgtgacatcacgactatcataagaaagatgatcaaaagtcacctcagtccatgaatagtagtagttgtcttggtcgataatatctctaaaattatggtcctttttaagaacctctagaacttgttcaatagtaatcatagttcctattttagccttaatgttcttgttttacaagtcacagccaaaagtttataataaactaaattatattttattttctagaaggaaagttatgactgaaactaaaactgatacacagcagcagcagatgctaagagggacggcatggatgacagcatccaatattatcagtcgtctattaggggcactttacattattccttggtatgcttggatgggtaaacagggcgaccaagccaatgccctctttggtcaagggtataatatttatgctcttttcctcttgatttcaacagcgggtattccagtcgccattgccaaacaggtgtctaaatacaacactcttggaaaaatggagacgagtttcttcttactcaagcgtatcttgtattacatgattggtctcggactgatctttggcgttttcatgtactttgcttcgccgtggatgtcttacctttctgggggagacgaggatctggttcgcgtcatgcgtagtctttcttgggcagttgttattttcccatccatgtctgttttacgaggctttttccaaggctttaacaatatgaagccatatgccttaagtcagattgcggaacagattatccgtgttatttggatgctgttggctaccttcttcatcatgaaaattgggacaggcgattatgtgacggcagttgtccaatcgacttttgccgctttcatcggtatgttggctagttatggggtgcttttcttctacctttggaaggagggcaagctcaagagcctttttggcaagcaggctgttcatccggatatcaatccaactgcaattgttattgaaacctttaaggaagctgtcccttttattatcactggatctgctattcagcttttccaactgattgatcaatggacctttatccgtactatggagaagtttacaagctatagtaacagtcaacttcaggttctctatgcttacttgtcttcaaacccaagtaagattaccatgattttgattgccgttgctctttctattgccggggttgggattccactcttgacggaaaatatggttaagaaagatcttaagggagcggctaaactgattatcaataacttacagttgcttttgctctttattgttcctgccattgtaggatcagtgattttagctaaaccactttatacagtcttttatggtgcgccagatagtcaggcccacttgctctttgtagccagtctgattcaagttattttcttggccttgtacagcgttttagcaccaatgcttcaggcaatctttgaaacccgtaaagctatcaactattttgcgattggggttttagttaaggcaatcctacagttaccattgattattttcctaggagcccttggcccggttatttcaacagccatcggtttaggtgttccgattgctctcatgtataatcacctccacactgttacgcactttagtcgtaagacagtgtttagaaaagccttgctcatctgtatccttacagtgctcatggctatcccagttgcggtcttctattggttgttccagtttgtactgtcaccaacaagccgtatgggtagtgtgatttacttggtcattggaggaggccttggaatcggtgtctatggcgttcttgctcttgtaactcgtatggctgaccaactacttggtgctcgagcagctagcctacgtgctaaattacatattaaataaaatctaaaccaagtcatgtggcttggtttttttcttttcaaccttttctgaaaaaggagtataataggggtgaaaaaatgaaatcgttttaatgatttagaatcgaggaaaggattatggttgattctagacaagaacatataaaattagggacctatcctcccgaacaagtttaccaagtcttgcagacaagcactcaaggtttgagcttacaagaggttaaggagaggcaggcgacgtatggccctaaccaattgaaggaaagtaaaaaggagcctatttggttggtctttttcaggcattttactagtcttatggcgctcttattgtgggttggtggctttatcgctatgctttctcatagtttagagttggggattgcaatctggttggtcaacattattaatggtctctttagctttattcaagaatatagggcaagtcaggctacggcagctcttaacaagcttcttccatcctatgcgcgagttcttcgtgatggtaaggaggataagattctagctcaggacttggtaccaggtgacttggttttcattgaagaaggggaccgtatttctgcagatggacgcttggtcgctgtgacagatttgcaggttaaccagtctgccctcactggtgagtctaatcctatatataagtcagatcaagcggatttgactcctgacaagactgagttagagtatgacaatatggtgtttgcagggactactgtctcttctggttctggacattttatagtatctgctatcgggatgaaaactgagtttggacagattgcggatttgacacagaatcttgctcaggaaaagagtccccttcagaaggaattggaccatttgactaaacagatttcagttattgcggtgtctgtaggtctcttctttatggtcgcagcgactctattagtccatcagcctttgtctcaagcctttatttttgcattggggatgattgtggcctttattcctgaggggcttcttcccacagttactctatctttagccatggccgttcagcgcatggctaaggaccatgctttggttaagaagctgtcttcggttgagacgttgggagcaacttctgttatttgttcagataaaacaggaactttgacgcaaaatgccatgacggttaaccatctgtggaccttgtcagacagttatgaggtgactgggctgggttatgcatcagaaggacagattgagcaggaagggcaacctgtttctcttaaagaaaatgagcttcttaatcgtttggtccgattctctcatttggctagtaatgctcaagttgtggcccctagtgttgataatcccaattttacaattttaggtgatccaactgaggcttgtcttaatgttctcgctgaaaaagccggaattaatttaaatgacaatcatatttgggcccctcgtatcaaggagattccctttgattctgatcgtaaacggatgacgacagtgcataagcttgaagcaggattggatggcagtcatcatatctctatcaccaaaggtgctcctaaagaagtgatggagctttgctcggactactatgataatcaagggatgattacatcattgacggctacggagcgtcaggctatccttgcagctaacgaccagtttgcccgagatggtttacgtgttttggctgtggcttatagacctttagacagtgagcatgttggagaagacaagtgggacatgcagaccttggaggacaatatggtctttctaggcttggttgccatgagtgatccgccacgtcagggtgtgcgtgaagccattgaaaaatgccatagagctagtattcgtattatcatggtgacaggtgattatggtttgacagctcttagcattgccaagaaaatcggaattgtacaaggggacgatgcacgtgttgtttcaggccttgaactggcagacatggatgacaatcagcttaaagaagctcttaaaggcgaaatcgtttttgctcgtgtagcacctgaacaaaaataccgtgtggtcaatgcccttcaagaacttggcgaagttgtcgctgttactggtgatggtgttaatgatgcccctgcccttaaaaaagctgatatcggtgtagctatggggctatcaggaactgatgttgccaaggaatctgcagatatgatcttaacagatgatcattttgcttctattgttcatgctgttgaagagggtcgtgcagtttatagaaatattcaaaaatttctgacttatatttttaattccaacacaccagaagctgtaccctctgctttcttcttgttctctttgggacgcatacctcttcccttaacggttatgcaaatcctagctattgacttggggacagatatggtacctgctttgggattgggggttgaaccacctgaagagggcgttatggacagaccaccaagacgtctttcagatcgcttgctcaatcgacaattgttgattaaagcttttttctggtatggactgattgaagcagccttagctatgggggctttcttccttaattattgggttaatcaaggtaacttaaaccatttggccagctcaggtcctctctatcgagaggcaactaccatgaccttaggtgctattatctttacccaaattggtatggctatgaatagtcgtaaaggtagagggtctatattccaagttaaaccatttgctaatcggattattagcttagggattgttttagaaattgttctctttatcatcctgtcttacgtgcctttcttccacacgctatttaacactgcacctattggacttgatgattggctctatttacttgcttgtccgtttgttattatggctttggaagaaatcagatatcgcttatttgataaaaagtaagtcagtggcataccttagattgaagcaagacttttaaatcatttcttagtgcttgaaactatgatgtttcaggcactttttgatgcttgaaaacctacttttgacaatctcaaaaattgggcttattttaaattatagtcagcatctatctgtctttttaggttatagaaataaactataactaactatcaagaatccgtatgatgaacttaccattattttcagaaaatagtgataaaatagaggtcatagatatggagtatatccactttaccatgtagaaagggcgcattatgacacaagaatatcaattagaaaccattttggcacacgcaggaatcaattcggatgaagcaacaggagccttggcttcaccaattcatttttcaacaacttaccaacatccagaatttggccattctactggttttgactatacacgaactaaaaatccaacacgcgcaacagtggaaaaaacacttgcagctattgaaaaagcagattatgctattgcgacaagttcagggatgagcgccattgttttggcctttgaaattttcccagtaggcagtaaggttgtagctgcgcgtgacctttacggaggttctttccgttggtttaatgacaaggaaaaagaagggcgtttcttttttgaatacacaaatacagaagatgagatgattgcggctattacagaagataccgatattgtctacatcgaaacaccgacaaacccacttatgattgagtttgatattgaaaaagtggcaaaaattgctcatgacaagggtgcggtggttattgttgataatactttctatagcccaatctatcaaacaccgattactcaaggggctgatatcgttgtacattcagctactaaatacctatcagggcataatgatgttttggctggtgttgttgtgactagcaaccaagaattctacgataaactttattataacctcaatacgactggtcctaccttgtcaccatttgatagctatatgcttatgcgtggtcttaagaccttaaaacttcgtatggaggcatcaacagccaatgctcaagaagttgttgctttcttagaaaagtcagcagctgttaaggaagttctttacccaggaaagggtggtatgatttcctttaaagtggctaatcaagacaagattccaactattatcaattccctaaaggtctttacttttgcggagagcttaggtggtgtcgagagcttgattacctacccaacgacacaaacccacgcagatattccaagtgatgtgcgtgcttcctatggtttgacagacgacctgcttcgtctttcaattggtattgaagcagcacaagatttgattgctgacttggaaaatgcccttagtctttaaggagttatctatgacacgttatgattttacaacacaaccaaatcgcttggatcaaaataccatgaaatggcacgaagccgaaagcaatccagaactacttgagctttgggttgccgatatggacttcctacctgttcctgagattagggatgcagttatcaactatgctgagacacatatttttggttatccttatccaagtgaagagctttatcagtccatcattaattgggaaaaaaatcaacacggttacgtcgttgataaagagagtattgttctcattgaaggtgttgttccagccatttcaacggctattcaagcctttaccaaagaaggtgatgctgttctcatcaacacaccagtttatccgccttttgctcgttctgtccgtttgaataatcgtcggttgattgaaaatagtcttgttaaggttaatgggcatttcgaaattgattttgaacaattggaacgtgatatcgtcgagaatgatgttaaactttatgttttctgtagcccacataacccaggtgggcgtgtctggaccaaagaggaattgactaaggtggcagatttgtgtcagaaatatggtatcctcttggtatctgatgagatccaccaagacttagccctatatgggaataagcacatctctatgaataccatttcagatgcttacaaggactttaccttggtgcttagttcggctactaaaacctttaatattgctggtaccaaaaacagttttactatcattgaaaatgaagacttacgtaaagcctttaaacaaaagcagttggcaaataatcaacatgaaattccaaccattggtttgattacaacccaagcagctctgacctatgggcaaccttggttagaggaattgaagactgtctttgaaactaatattgaccttttaaccaaggaacttagtgaaaagactaatatcaaagtcatgaaacctgagggaacttacttggtttggcttgatttttcagcctatgatcaagaccataatgaacttggacgtttgcttaaagaagaagccaaggtagtgctaaatgacggtattacttttggttccgaaggagaaaaacatttccgctttaacgtagctacgccaactacagttgttgcagaaggggttaaacgtctcgtttctgtctttggaaaataataaaagtgatgcgaacagcatcacttttattattgttatgagtgtacatcgtagattttcaagtttaatagaatatcttcctgagtggagaagaccttgacatcttgcttgccagaggtattaaatctggctagagtgtaggtttggccattggggaagaaaatttccaagctacgattgtctgtaataagcgttatagtgatattatcagtttccttatagtgactgtcagctttataaccttgaccgttacctaagagaccatcgtaatagtaagaagaggcagtttgactaccatccatgctgttattcagttcggcagcataggcagagacctgataggtaccacttgttatttggtaggcgattttaacgtaatcagagccttgccagatatcaatgtagatatagcctccttctttcttaatatttgaaaaatgcagttgataatatcctgcactattttttccagcaagatcaagaaggccattagcattctgattgtgacttttatcaatccaaggttttctattgtcactggtgagcggtctttgactcgaaatgttgccgttttgatttttgagggttaattgttcatttttatagaggggagcagactgaataatattgttcttatctagctgtagctgtctgggtgtagtgtaaaaaccgatagtttttagaaaatcactcttggcctcttggtcactgtgaatgcctgacgtgaagtagttccaattaccaacccagccaagactgataaggttatggttgctttcttcaattcgatcgcttccagtgaagttagcgccataatagtctgagccttgatctaagcgtttcgtttctgtgtctgcaataaataagccgttatcatctaaatgccctacagtatagtaggttccagttgtttcacctgaggctgtatccttagctccaaaaaagagaacttgcttgtcccgatcatcagttgttgtcattgtttttagaacgggacactcgataggagcgttgtcctgccagttacgacccttaaaaaatgtttcgggtaggattttggagtctcccttgctatctgctttggtccagttaataccatcttgagattgataaacacctaaggcgtcaccttcagcgacatacatgagtaatttgtctttgaagtggaagacataaggatcgcggaaatctttaccgttataggattgttcctttgtcaataaaggtttaccatcttttaaggctttagtaaagctagttcccttgtcgtttgatgcactagcatagattgcctggcttccatcatccatgagtccggtaaaataggcgacaggttcttctttttggataccagaaagaccctgactatctgtgactacactacctgtccaagcagaatgccatccctctttagagtcaccaccctttgctggtatagcagtctcttgtttactataggtgataaaatctttagtcgttgtatgtatccaatcttgaccgctaggtccaaaaggattagtagccccatccacagagtgtagaaaatagatatcatagtaatttttttcttgattccacacgatagtctgtaggtcgttagaccatcctttatgagatgctagatgaaaggtttgactcacagaaaccttatttgttttttgggaaggattgttagcgttctcattttttattataaaaacaaaaaataaaattaaaaaaacgagagctaaaattagaggtgaatattttgattccatatagtgatatttcctgataaaattacttattttgtagttattattttaacaaaaaaatagttttttacaaaaaatataaatttattattaaaaaagattggaatttagattaaaaaatgatagaataaaacatgtgaaaacctaaaaggagagtttaatatggatagtacagttaattcacagtcaaatacagtagcaccaaagcaagcagagtgcaaaaagatgcgttatagcatccgtaaggttgccacagtaggggcaacatcagcgctcgttggtaccttggcatttttgggtgccactcaggtaaaagctgatcaagttacagaaacagcaccagcggtagctactgcgacagcaacaccagaaacaagcacagcatctctaacggtagccagtgaaacagcaacaagtgtggcaacttcagaagcagttgaatcttcagttgcacattcagaggttgtaaccacaccagttacagagacacaaccaagcaacacaactccatcagtagtcgaagaaaaggcgtctagcacagtagtgacatcttcatcagatgcaacaacaccttcagcaacagttgctgcggtttctgctccagctcatacatcagaggctgcagtagaagcaccaacttcaacagcaagctcagaaacagctgatacacacactgaagtagcccttaaacctactgaaaacagtgctgctaatgcaaaccttagcaaacttaacggtcgtatcaagtctattgttgaagataatatgacctcagatcaaatcgttgccttgactgaggaagaaattaaagcacttaataaagttgactttagtgatgatgctatcaaaggtacaggtactagcttgacttaccgtaacttgaaggatatcgttgctagcttcttgaagcaagacagcaaattggctgttccttactttaaagcagatacaattatcaatatgcctgctttcaacactgttgatgcccaaacgatgaaaaaagaagaaatcgacgtttgggattcttggccagtccaagatgctaagtcaggtgtagttagcaactggaatggttaccagttggttatctcaatggccggtgcaccaaataaaaattcaaaccacatttacttgctctatagaaaatatggggataatgactttactcattggaaaaatgcgggtccaatctttggttacaatgcccttgaagatgaccaacaatggtcaggttcagcgactgttaactctgatggtagtatccaactttattacactaagaatgatactagtggtggtaaattaaactggcaacaattggctagtgctacacttaacttggctgttgaaaacgacgaagttgttatcaagtcagttgaaaatgaccacattctctttggtggagataattatcactatcaaagctatcctaaatttatgagtacttttgatgatgaccataaccatgatggtaatccagaccgtacggataactactgtcttcgtgacccacacatcattgaagataacggtagccgttaccttatttttgaatcaaatacaggtgacgaaaactaccaaggcgaaaaacaaatttacaaatggtcaaactatggaggagatgacgcctttaaccttaagtcattcctcaatattgttaataataaacacctttacaaccttgcatcatgggcaaatggttctatcggtatcttaaaacttgatgacaatgagaaaaatccatctgtagctgaactttacacaccacttgttactagccacatggttactgatgaagtagaacgtccaagtgtggttaagatgggtaacaagtattacctcttcactgcttcacgtatcaataaatctacggatgctgaaggtactgtagcagcgcgtgaagctgttggtgatgacgttgtcatgcttggattcgtatcagatagcctccgtggagaatatcgcccacttaatggatcaggtgtggttttgacagcctctgtaccagctgactggcgtacatctacttattcttactatgctgttcctgttgaaggttcaacagatactcttttggttactgcatatatgactaaccgtggtggtattgccggtgctgagaataaatcaacatgggctccaagcttcctcatcaagatgaatgcggatgatactacagaagtccttcctaagatgacaaatcaaggagactggatttgggataaatctagtgaaagtttggtacatgtgggtgaccaaaacagtgctaagttgccaaatgaggactttaatgtcgattattattccgtttcaaattatggacttaaaccacatacttatcctacagttgatggttcaacaggcgtttctgaagctcacggtgtcttgactgtaactgttaaagatggtaaagacaagaaggcagataagccagaaacaccagtaagtccaacagaaggtaatcattctgttgatgataagtctaacaaaccagatacaccttctaaaccagcagacaataatcaaccatcaactaataaagaagataaaccagcaacgccgacgaatccagattctccagttcgtaatccgttcccttgtttcacagatcgcccatctaatgataataattcatcagatgatcatcatgtagaggttcctgcgaaaccttcaacagagggttctgtgggtgaccgtcgtccagtagctcaagctacagagattgcgtcaccagtaccagaggctattgtagcaactggaccaactgtttcaacgactcctgttaaagaagagtctgtcactgaaacagaagctccaaaaccagctaagtctgaagaggaagttcagtctcacggagtcgctaaagctgatgaagtaactaagtctgatgagtcaagtaaagacaacaatactaaagttgctgccaaacttgctacgactcctaagacaccaagtgattcagaaggttcaaagagcaacattctttcaatcttggcgactatctttgcagcaattgcaagtctagctcttcttggctatggtttggtcacaggaaagattcatttgcctaaaaaataatccttttcaaaaacgtttgcagtaaagcaagcgttttttttgcctttttgatataatggagtgaatataaagcaaaggaagaaactattatgggtaaatttcaagttatttcacatccactgattcaacataaactttcaatcctccgtcgtgaggatacttctactaaggacttccgtgagctagttaatgaaattgctatgctcatgggttacgaagtgtctcgtgaccttcctctcgaagaggttgaaattcaaacaccaattaccaaaactgtacaaaaacaactttctggtaagaaattggcgattgttccaattcttcgtgcgggtattggtatggtcgatggtttccttagccttgtaccagcagctaaagttggtcatattggtatgtatcgtgacgaggaaactcttgagccggttgagtacttggttaaattaccagaagacattgatcaacgtcagatttttgtagtagacccaatgcttgcgactggtggttcagcaatcttggcagtagactcacttaaaaaacgtggcgctgctaatatcaagtttgtttgcttggttgcagcaccagaaggtgtcaaaaaattgcaagatgctcacccagatatcgatatctacacagcatctttggatgagaaacttaatgaaaacggttatattgttccaggtcttggagatgcaggtgaccgtctctttggtacaaaataagttaaaaagggaaaatttccctttttttactagattaataagttttaagtgagattggtttaggagagtttagcactcttttagagagagtgctaagaatgatgttttttatttgacctaatttgactaaaatcatataatagcatcaagacaatattaaaaggaggattcatatgattcctgtagtaattgaacaaacatcacgcggtgagcgttcttatgatatttactcacgtttgctcaaggatcgtatcatcatgttaacaggtcctgttgaagataatatggcaaactcaattatcgcccaactcttgttcttggatgctcaagacaatacaaaagatatctatctttatgttaatacaccaggtggttcggtatcagcaggtcttgccattgttgatacaatgaacttcatcaagtctgatgttcagactatcgttatggggatggcagcatcaatgggtacaattattgcttcaagcggtacaaagggtaaacgtttcatgttgccaaatgctgagtacatgattcaccaaccaatgggtggtactggtggcggtacgcaacaaacagacatggctatcgcagctgaacacttgctcaagacacgtaataacttggagcaaatcttggcagataattctggacaaccaattgaaaaagttcatgtagacgctgaacgtgacaattggatgagtgctcaagaaacgcttgaatatggtttcattgacgaaatcatggctaataaccaattaaaataagactagttgatcttaaataaaagtcggatgtaaataggttatataaggaccgtttcatctggctttttgtgttataatagaaaacatgttaataatcaatgaggagttgcttgctattgatcaagctatagacagtcttgtttcgcactttcagatgttaccagaggtagatgcctatcgtctgagtcgtcagcaattcgaaaatgacagagaacttcaagagcaactctttgcatttcaagaattaaaggattgctatgatactgctaaggcgtatgaggcttttaggccagatgtgagagagttgaaacgtcgggttttgcgaatgaagcgccaaattgatttaaacgaggtggttattggctatcgtcaggcagagttcgatttacagattattttagccaatcttggtgaggagattgcccaagctgtttcagaccagatttttattgatactgggctacctcttgcccctcataaaccacatcataaaaagggagacactaacataaaggagaagatgagtcatgattaagcgtcaaggcattattgtttatttatactacaatagagacttacgtaaaattgccaagtttggggatgttgtctaccattcttataagatgcgttatgtgcacctttatgtagatgaggacaaggtcgaggatattttgaaagagctcgatggaatgaaagcagtgaaaaaagttctgccttcctactattctgatattgatatggactttgtaggtagtctggaacgttacgacacctcagtccctgaaccgtttaagaacttttctctttaataagagaaaagtttttttctttaataagagttattcttaaagcaatggaaacgattactgccgctaaagcttagttgtgtgtagttgacaattgtctgataattctgtaagctataaggtggacttttttaagaaaatattaaggagaaatcttatgtctaaaaagatcacacttattgtgttagccttttttgcttccattttcttggttgcctgtggcaagtcaccagatgtgactgctaatgccaatggtactaagattggcgatacaatcaaaattggtgttaacatggagttgacaggtgccgttgcagcctatggtaaggcagagcagaatggtattaagttggctgttgacgaaattaacaaagctggtggcgtcgatggcaaaaagcttgagcttgtcacaaaagataataaatctgaaaatgctgaagcttcaacatcttcaacgaacttggctattcagaataatgtaaatgctatcgttggtccagcgacatcaggtgctgttgctgcggctagccttgtatcacaaaaaacaggggttcctttgctgacaccttcaggtacgcaggatgaccttacggtagatgctaatggtacgaagaaattcgttttccgtacaaccttcaaggatagttaccaaggtaaagttttggcagcttattcttacaataatttgaatgctaagaaagtagttctctactatgataatgcttcagattatgccaaaggtattgcggatgaattcaagcgtgaatataaaggtaaaatcgttactgaagctacctttgcttcaggggacaaggactatcagtcagcattgactaaatttaaagaccttgattatgatgctattgtaatgcctggttactatactgagactggtattatcactaaacaagcacgtgaccttggaattgataaaccaatccttggacctgacggattcagtgatgcgaaatttactgagcttgcaggtaaaaagaatgcttcaaacgtctactatgtatcaggatattcaacaaatgttgctctttctgacaaggcatcaggattcatcgaagcatataagaaagcttacaacactgacccaaatatgtttgctgctctagcttacgattctgtttatatgattgcagaagcatcaaaagatgcgaaaacatcagttgatattgctgataacttagcacatttgaaaaactttgtcggggttactggtaaaatgacgattgataaggatcataaccctattaaagcagctcttatggttaaaagagataatggtgaagaagtttcagcggaagccgttgaaattgaaaaataatctgttatcaatattgaaaatgaactagaaagtttggttatatatgttttttgaacaacttccccaacaactagtcaatggtatcatcttgggtagtatctatgctctacttgcccttggatataccatggtttatgggattatcaaattgattaactttgcccatggagacatctatatgatgggtgccttcgttggttactatgcgattaatagccttggaatgaatttctgggttgcccttgtctttgctatgcttgtctgtgcgattttaggggttgtcattgaattcttggcttatcgcccactccgtaattcgacacgtatttctgccttgattacggctattggtgtctcattcttccttgagtacatcatggttctctttgtaggtgcagatacacgttcattccctcaaaagattgcaattgagacttatcatcttggatcaatctctgtaacaaatgtgcaattgcttatcttggtagttgcccttgtccttatggttgctcttcaattgattgttaaaaagactaagatgggtaaagctatgcgtgccgtatctgtagacagtgatgcagctgaattgatgggtattaatgttaataacactatcagcttcacttttgctcttggatcatcactagcaggggcagcgggtgttcttattggtctttactataactctatcgaacctcttatgggtatgacgccaggtattaaagcctttgttgccgctgttcttggtggtatcggtattatccctggtgcagcacttggtggatttgttatcggtattttggagacattatcaactgcaattggtttgtcaagttaccgtgatgccatcgtttatggtgtcttgattgttatccttttggttcgcccagcgggtatcctcggtaaaaatgtgaaagagaaggtgtaagacatgaagaaaaatctaaaagtaaaccttatttggtttggtcttatcattgggctcttccttatcttgaaaggtcttgaactttcaggtatcatgaacctttactacatccaaatcttaatggggattggaatctcaattcttatggggcttggtactaacctggttcttggtttctcagggcaatttacacttggacaagctggtttcatggcaattggtgcctattcatcagctatcatcactggtatgatgccaacatatgacggtttctacctctcaatggttgtcggtgtcatcatcgcagctattgttgcccttatctttggtctacctacccttcgtttgaaaggggactaccttgccattgcaactcttggtatggctgaaatcatccgtatcattatcgttaatggtggagaattgactaatggtgccgctggtttgacaggtatccttccttatacaagttggcctgtaatttatttctttgtcgttatcattacaattttggtacttaacttcttgcgttcagcaactggacgtcaagcaatcactcttcgtgaagatgaaattgctgctgagtcaatgggtgttaatgtcacaaaaatgaaggttcttatctttgttattggtgccatgatttcagcgattgctggttcactttatgtcagctacatcggtacagttgtgccaaaagatttcactatcatgaaatcaattgattaccttatcattgccgttcttggtggtcttggatctatcacaggtactatcattgccgctgttgttcttggtattatcaacatgttcctccaaaatgtttcaaaccttcgtatgattatttacgccttggctttgattcttgtaatgctcttccgtccaggtggacttcttggaacaaaagaactctatctctcaaaattcttcaataaatctaaggagggcaaataaaaatggcacttcttgaagttaaaaatctaactaaaaacttcggtggtttgactgctgttggtgatgtttcaatggaactcaatgaaggtgagttggttgggcttatcggaccaaacggtgctggtaaaacaaccttgttcaaccttttgacaggtgtctatgagccaagtgaaggaacggttacacttgacggtacagtcctaaatggtaaagcgccttataaaatcgcttcactcggtttgtcacgtactttccaaaatatccgtcttttcaaagacatgactgtgcttgaaaatgttcttgttggtttgtcaaataagcaaccttcaaatttctttgcatctcttttgcgtttgcctaagtactattcaagtgaggaagagttaaaagcaaaagctatgaaactcttggctatcttcaacttggatggagaggcagatacacttgcgaaaaacttagcttacggacaacaacgtcatttggaaattgttcgtgcacttgcaacagaaccaaaaattcttttccttgatgaaccagctgcgggtatgaacccacaagaaacagctgaattgactgctcatattcgtcaaattcaaaaagacttcggtattacaatcatcttgattgaacatgatatgagtttggtcatggatgttactgagcgtatctatgttttggaatacggacgcttgattgcagaaggaacacctgatgaaattaagaataacaaacgcgttattgaagcttacttgggaggtgaagcataatggctatgttgaaagttgaaaatctctcaattaaatatggatctattgaagctgttaaaaacgtcagctttgaagttaatgaaggtgaagttgtaactctaatcggtgctaacggtgcaggtaagacatcaattcttcgtacaatctcaggtcttgttcgtccaactgagggaaccatttcttatctcggaaatgatatccataaaacacctgcacgtaagattgttgctgaaggtttagctcaagtacctgagggacgtcatgtatttgcaggattaaccgtaatggaaaatcttgaaatgggagctttccttcatacaaataaagaagagaacgcagctctcttgaaaaaagtcttccaacgtttcccgcgcctagaagaacgtaagaatcaagatgcagcgacactttctggtggtgaacaacaaatgcttgcaatgggccgtgcccttatgagtcgtccaaaacttttgcttttggatgagccttcaatgggacttgctccaatctttattcaggaaatttttgatattatcgaagatattaaggcacaagggactaccgttcttttgatcgagcaaaatgccaataaggctttgtcaattgcagaccgtggttacgttcttgaaactggtaaagtggttctttcaggtactggtgaagaacttcttgcatcagatgaagttcgtaaagcctatcttggaggataagaaaaagcgcccaagggcgtttttctatcgtctcatactgattgtaaaatactaatttttcagtaaaatattgcaatcggttacaatttgtgtggtataatacaagtaagaaatcattcggaggaaaatgaaacatggcagtaaaagattttatgacgaaacgtgtggtttatatctcaccagaaacaacagttgcagcagctgcagatattatgcgtgataaagggttgcgtcgtttgccggtaattgaacacgataaacttgttgggcttattacagaaggtacaatggcggaggcttcaccatcaaaagcaacaagcttgtcaatttatgaaatgaactatctccttaataagacaaaggtaggagatatcatgattaagaatgtccttacagtttccaaatatgctagccttgaggatgcaatctatatcatgcttcaaaataaagttggagttcttccggttgtggacaatgaccaaatttcaggaattatcacagataaagatgtctttcgtgctttcttggaaatttctggttatggtcaagcgggaattcgtattgggctggaagttccagatactccacgtgttttggaaaaaattgcgaaccttatcgctagtgagaatctcaacatcgaacgtacaattgttgcacctaaaaatgacaccgtacttcgtgtcgaactccaagttgaaggagagattggaattgaacaactcaagaaagtttttgtagaagcaggatttacagttactgaaattgtagagacagaagcaaaagagttagactaacaaagaagttaaaacaaattctttagacttcagttatcctaaaaaatagaaagtttgtaggaacagttcagtggaaatgagattataatccttgctttttctagtaattaatgaactacaggcttaaattttatacaataaaaaagaggctagaacattatgttccagcttcttttttattagtcttgaaaatcgtaaagtgttgtagagaggtagcgttcaccgttgtcaggcaagagtgtcaagacttttttgccttcgccaagctcagcagcaaccttaagggcggcagcaatagcagcacctgatgagataccagctaggaaaccttcttggctacccaatgtacgtgatgttgcgatagcttcatcagaaggaatacgcacaacactgtcatatgattttgtatccaatgtgtcaggaatgaaaccagttgagataccttggattttgtgtggtcctggtttatcaccattcaagacagcagattcgtcagcttcaataccgtaaaccttgatatttggattagcagccttaagggtttttgaaacacctgaaatagtaccaccagtaccgataccagcaacaaaggcatccaaaccttctgcaccaaaatcttcaagaatttcttgaccagttgtagccgcgtggacagctgggtttgatgggttggcaaattgaagtggtacccaaccgttgcgttcagcagcaacttctttagctttagcaatcgcacccttcattccttcgctaccaggagtcaatacaagttcagctccataagcttggatgattttacgacgttcaacactcattgtgtcaggcattacgataacaactttatagcctttagcagcaccaacccaagcgagaccgataccagtgttacctgaggttggttcaacaatggtatcaccaggtttaatcgtaccagctttttcagcatcttcaatcattcgaagagcaatacggtcttttactgaagaaccagggttaaaggcttcgagtttaacgtaaacatctgctgatccttctggaacaatagagttaagtttaataacaggtgtttttccaacaagttcagtgattgagttgtaaattgtcatatttaaaatcctcttaatctttgattgatggttttaagtatacgacggtaggctcaacttgtaaaatacatcttctttatcactgtgataacgtttgactatcagataggaatttcaacgattttctttccagatttttcataattaactttcccctgatagaattcggttagttcctgaccgagtcttttaatctcagactcttcgacaaataaagtagtagagacatctgataagaaacttgtatcaaattcttggagtccttctttttcaaggaagttggagaaaacttggtactgagagtaggttaactctacggttagtcctgttaattccttgacttcgactcgaccaatttcttcaatagcatgggcaacgctaccagagtaagcgcggataagaccacctgccccaagtttgattcctccaaaataacgagtcacaacagctacgacattagtaagtccttgtttttcgagaacagtaagcataggcacaccagctgttccagaaggttcgccatcatcactcgaacgcttaatttgaccatcatcaccaacaatcattgcagagcaagaatgattagccttgtgatgttctttcttaatctgagcgatgtactctcttccttcttcttcactactaatacgtttcaagtgacaaataaaacgagattttttgatttcttcttcaacgattccatcgttggcaatagttttgtaatccataaaaaaattttatcataaaaagatgaattcaaacatattttcgaatagaaagatatggtacctaaagaatattatggacgactatttacgaaagaacagttgccagtggactatcactcagaggcttttacattggaaagcatgataaaggtcgataaacaacttagatgtaaaagatgttacagtcagatagaagaaaattggcaattaccggaaggtcagtattattgcagagcatgtattgtctttggtagaaatcaagaaggaaatgaactctattattttccttcaaaaacatctgaaattgaatttcctgttttgaagtggttgggggaactgactccctatcaagctgaggtctcagagaagcttttagaaacatatcaaaaacagaaagacagcctcgtacatgctgtgactggtgctgggaagaccgagatgatttataaaatcgttgcctatgttcttgaaagtaaaggtaatgtagctatcgcaagtcctcgggttgatgtttgtcgagagttatttcttcgtatgcagagggattttacttgtagtatttctctgcttcatgctgagagtgaaccatatgatggtagtccgcttgtaatagctaccacccatcaactactaaagttttaccagaactttgacctagttatcgttgatgaggttgatgcattcccttttgtaggaaatgtcatgttaaatcatgctgtggagcaggcaaagaaggaaaccggtcgctatatttatttaacagcgacttctacattatctttagaggagcaagtgcgacttggatttttagaaaagcatcaccttgctagacgtttccatggaaatcctttagtacttcccaaattcttttggcagggaagactacaaaaatctctaatgagaggcaagcttccaagacctcttgtttatcagattaaaaagcaacgtaaatccaaattccctctattaatcttttttccaaatatagcgataggtgaaaagtttactagcattctgcaaaaatatcttccagacgaaaaaatggcctttgtttcatcaaaaagcgaggagcgttcagctaccgtagagcagttccgggaaaaagagttatccatcttagtgacaacaactatccttgaacgtggggtaacctttccacaagtagatgtttttgtttgtatggcaaatcatcacttatacactagttcgagtcttattcagataggaggtcgagttggaagatccccagatagaccgacgggaatgctttatttctttcatgaaggactatccaaatcaatgcttcgttgtcgagaagaaataaaggttatgaataaaaaaggaggatttaacaatgaagtgtctactatgtaatgactggattgaatcagtgccaaaattaagagacctgattacgtttaaccaaagagaagagtactcctgcgtatcttgtaaaaatcagtttaaaaaactttcaaaagaaagatgtcaaaattgtaataaggagttacatagagatacctgtattgattgtaaactttggatgaaaaaaggctatattcctaagcaccttgccatttatcgctatgaagaaaacatgaaagattattttagccgctataaatttatgggagactattgtcttagaaaaacatttcaaaaagatataaaaaataatttaaaacgattttttaaaaaaggttataccatagtgccggtcccattgtcggaagaacgcttggtagaaagagggttcaaccaagttgagggattaatagagggaattccctatcaggatatctttgagaaaagagatattgagaagcaatcatcgaaaacacgtgaggagcgtttaagtcaagataatgccttctgtctcaagaaaggtatagatgtaccagataagattattatagtggatgatatctatacaacaggatccactttatatcatatggttcaactattagaagctataggtattaaagaagttttgaccttttcactagctagataataaaaatccttgcaaattttcatgaaaaggatataatatagataaagaaaacgctaacaagcgagaaagaggtcttttatgattaaatatagtatccgtggcgaaaacatcgaagtaactgaagcacttcgtgactatgttgaaagtaaacttagcaaagttgaaaaatacttcaacgaagaccaagaattgaacgcacgtgtaaatcttaaggtttatcgcgaaaagacagctaaagtagaggttactattccaacaggttctgtaacactgagagcagaagatgtttcgcaagatatgtatggttctattgacctggtggttgataagattgaaagacaaatccgtaaaaacaaaacaaaaattgcacgtaagcatcgtgaaaaagttccaacaggagaagtattctcagctgattttaataacgaacaagttgaagaagcaccagctgttgaagttgtaagaactaaaaacattgagttgaaaccaatggatgttgaagaagctatccttcaaatggaattgttgggtcatgacttctttatctatactgatagtgaagatcatacaactaatgttctctataaacgagaagacggaaactacggtttgattgaagctaaataaaaaagaagggaagtaggttgagagacatgcttcctttatttttttcaaaaaacctattgacaagcattgatttgggtgataagatataaaagttgtcttaactgacttgccacaaacttgaaaaggttccaaaactttaaaaaagttattgacaagacaggtcagagatgatattataaataagctgtttcgggagagacagcggacacgagaagtaaaaaaaacttcaaaaaagtgttgacaaggtattctagatttgctagaatatagaagttgtcttaagagagacaaagacctttgagaactgaataagaaaccaagtgcagggttatgatagaagaattataacctgtcaatttacaagaataaatcgtcagacgacggtaatgagttaacgctcgaacaattattaaattttttaatgagagtttgatcctggctcaggacgaacgctggcggcgtgcctaatacatgcaagtagaacgctgaagagaggagcttgctcttcttggatgagttgcgaacgggtgagtaacgcgtaggtaacctgccttgtagcgggggataactattggaaacgatagctaataccgcataacaatggatgacacatgtcatttatttgaaaggggcaattgctccactacaagatggacctgcgttgtattagctagtaggtgaggtaacggctcacctaggcgacgatacatagccgacctgagagggtgatcggccacactgggactgagacacggcccagactcctacgggaggcagcagtagggaatcttcggcaatgggggcaaccctgaccgagcaacgccgcgtgagtgaagaaggttttcggatcgtaaagctctgttgtaagtcaagaacgagtgtgagagtggaaagttcacactgtgacggtagcttaccagaaagggacggctaactacgtgccagcagccgcggtaatacgtaggtcccgagcgttgtccggatttattgggcgtaaagcgagcgcaggcggtttgataagtctgaagttaaaggctgtggctcaaccatagttcgctttggaaactgtcaaacttgagtgcagaaggggagagtggaattccatgtgtagcggtgaaatgcgtagatatatggaggaacaccggtggcgaaagcggctctctggtctgtaactgacgctgaggctcgaaagcgtggggagcgaacaggattagataccctggtagtccacgccgtaaacgatgagtgctaggtgttggatcctttccgggattcagtgccgcagctaacgcattaagcactccgcctggggagtacgaccgcaaggttgaaactcaaaggaattgacgggggcccgcacaagcggtggagcatgtggtttaattcgaagcaacgcgaagaaccttaccaggtcttgacatcccgatgctatttctagagatagaaagttacttcggtacatcggtgacaggtggtgcatggttgtcgtcagctcgtgtcgtgagatgttgggttaagtcccgcaacgagcgcaacccctattgttagttgccatcattcagttgggcactctagcgagactgccggtaataaaccggaggaaggtggggatgacgtcaaatcatcatgccccttatgacctgggctacacacgtgctacaatggttggtacaacgagttgcgagtcggtgacggcaagctaatctcttaaagccaatctcagttcggattgtaggctgcaactcgcctacatgaagtcggaatcgctagtaatcgcggatcagcacgccgcggtgaatacgttcccgggccttgtacacaccgcccgtcacaccacgagagtttgtaacacccgaagtcggtgaggtaaccttttggagccagccgcctaaggtgggatagatgattggggtgaagtcgtaacaaggtagccgtatcggaaggtgcggctggatcacctcctttctaaggaaaaacggaatgtacttgagtttcttatttagttttgagaggtcttgtggggccttagctcagctgggagagcgcctgctttgcacgcaggaggtcagcggttcgatcccgctaggctccattgaatcgaaagattcaagtattgtccattgaaaattgaatatctatatcaaattccatatgtaattaaatacatatagatagtaacaagaaaataaaccgaaacgctgtgaatatttaatgagttaggtcgaaagaccaaaataaggttaagttaataagggcgcacggtggatgccttggcactagaagccgatgaaggacgtgactaacgacgaaatgctttggggagctgtaagtgagcaatgatccagagatgtccgaatgggggaacccggcaggtaatgcctgtcactcattactgttaaggtaatgtagaggaagacgcagtgaactgaaacatctaagtagctgcaggaagagaaagcaaaagcgattgccttagtagcggcgagcgaaacggcaagagggcaaaccgaagagtttactcttcggggttgtaggactgcaacgtggacttaaagattatagaagaactacctgggaaggtaggccaaagagagtaatagcctcgtattcgaaatagtctttatacctagcagtatcctgagtacggcgagacacgagaaatctcgtcggaatctgggaggaccatctcccaaccctaaatactctctagtgaccgatagtgaaccagtaccgtgagggaaaggtgaaaagcaccccgggaggggagtgaaatagaacctgaaaccgtgtgcctacaacaagttcgagcccgttaatgggtgagagcgtgccttttgtagaatgaaccggcgagttacgatatgatgcgaggttaagttgaagagacggagccgtagggaaaccgagtcttaatagggcgcattagtatcatgtcgtagacccgaaaccatgtgacctacccatgagcaggttgaaggtgaggtaaaactcactggaggaccgaaccagggcacgttgaaaagtgcttggatgacttgtgggtagcggagaaattccaaacgaacttggagatagctggttctctccgaaatagctttagggctagcgtcgatgttaagtctcttggaggtagagcactgtttgggtgaggggtccatcccggattaccaatctcagataaactccgaatgccaacgagatataatcggcagtcagactgcgagtgctaagatccgtagtcgaaagggaaacagcccagaccaccagctaaggtcccaaaatatatgttaagtggaaaaggatgtggggttgcacagacaactaggatgttagcttagaagcagctattcattcaaagagtgcgtaatagctcactagtcgagtgaccctgcgccgaaaatgtaccggggctaaaacatattaccgaagctgtggatacctttataggtatggtaggagagcgttctatgtgcgaagaaggtgtaccgtgaggagtgctggagcgcatagaagtgagaatgccggtatgagtagcgaaagacaggtgagaatcctgtccaccgtaagactaaggtttccaggggaaggctcgtccgccctgggttagtcgggacctaaggagagaccgaaaggtgtatccgatggacaacaggttgatattcctgtactagagtatatagtgatggagggacgcagtaggctaactaaaccagacgattggaagtgtctggccaagcagtgaggtgtgatatgagtcaaatgcttatatctataacattgagctgtgatggggagcgaagtttagtagcgaagttagtgatgtcacactgccgagaaaagcttctagcgttaattatactctacccgtaccgcaaaccgacacaggtagtcgaggcgagtagcctcaggtgagcgagagaactctcgttaaggaactcggcaaaatggccccgtaacttcgggagaaggggcgctgacttatggtcagccgcagtgaataggcccaagcaactgtttatcaaaaacacagctctctgctaaatcgtaagatgatgtatagggggtgacgcctgcccggtgctggaaggttaagaggagtgcttagcaatagcgaaggtatgaattgaagccccagtaaacggcggccgtaactataacggtcctaaggtagcgaaattccttgtcgggtaagttccgacccgcacgaaaggcgtaatgatttgggcactgtctcaacgagagactcggtgaaattttagtacctgtgaagatgcaggttacccgcgacaggacggaaagaccccatggagctttactgcagtttgatattgagtatctgtaccacatgtacaggataggtaggagcctatgacctcgggacgccagtttcgagtgaggcgttgttgggatactacccttgtgttatggctactctaacccagataggttatccctatcggagacagtgtctgacgggcagtttgactggggcggtcgcctcctaaaaggtaacggaggcgcccaaaggttccctcagaatggttggaaatcattcgcagagtgtaaaggtataagggagcttgactgcgagagctacaactcgagcagggacgaaagtcgggcttagtgatccggtggttccgcatggaagggccatcgctcaacggataaaagctaccctggggataacaggcttatctcccccaagagttcacatcgacggggaggtttggcacctcgatgtcggctcgtcgcatcctggggctgtagtcggtcccaagggttgggctgttcgcccattaaagcggcacgcgagctgggttcagaacgtcgtgagacagttcggtccctatccgtcgcgggcgtaggaaatttgagaggatctgctcctagtacgagaggaccagagtggacttaccgctggtgtaccagttgttctgccaagagcatcgctgggtagctatgtagggaagggataaacgctgaaagcatctaagtgtgaagcccacctcaagatgagatttcccatgattttatatcagtaagagccctgagagatgatcaggttgataggttagaagtggaagtgtggtgacacatgtagcggactaatactaatagctcgaggacttatccaaagaaagtaactgagacatattgacaacgatttggtttcttgatacagtatagatattcaattttgagttgagaatactcagagttaagtgacgatagcctaggagatacacctgttcccatgccgaacacagaagttaagccctagtacgcctgatgtagttgggggttgccccctgttagatacggtagtcgcttagcgcatagggagtttagctcagctgggagagcatctgccttacaagcagagggtcagcggttcgatcccgttaactcccataggtcccgtggtgtagcggttatcacgtcgccctgtcacggcgaagatcgcgggttcgattcccgtcgggaccgtcaagtagaaatatttgagactcgttagctcagttggtagagcaattgacttttaatcaatgggtcactggttcgagcccagtacgggtcatatatgcgggtgtggcggaattggcagacgcaccagatttaggatctggcgcttaacggcgtgggggttcaagtcccttcacccgcattagaaaagttagccggcttagctcagttggtagagcatctgatttgtaatcagagggtcgcgtgttcaagtcatgtagccggcataaagatggtccgttggtcaaggggttaagacaccgccttttcacggcggtaacacgggttcgaatcccgtacggactatatttcgagtaacttaggttactctttttattttgtttcttttttttatatgttataatagcttataatactattttgaggtgaatttatgtctaaagtttttgtttttggtcatcaaaaccctgattctgatgcaatcgggtcttcttatggatacgcttatttgaaacgtcaacttggtgttgatgctgaagctgttgctttgggtactcctaacgaggaaactgcttttgttcttgattattttggtgttgaagcaccacgagtggttgagtctgctcaatcagagggagttaatcaagttattcttacagaccataatgagtttcaacaatctatttcagatattaaggacgttgaagttattgaggtagtcgaccatcaccgtgtggctaactttgaaactgctaatccattaatgatgcgattggaacctgttggatctgcatcttcaattgtttttcgtatgtttaaagaaaacaatgttgaagttcctaaggaagttgctggtttgcttttgtcaggtttgatttcagatactcttcttcttaaatctccaactacacatgcttcagatcctgcagttgcagctgaacttgcagaaattgctgctgttaatctagaagaatatggtcttgctatgcttaaagctggtactaatctttcttcaaaatctgctgaagaactcattgacattgatgcaaaaacatttgaattgaatggtaatcaagttcgtgttgcacaagttaatacagttgatatttctgatgttctttctcgtcaagcggaaattgaagaagctattaataactcaattaaaaacaatggttactctgactttgtcttaatgattactgatattcttaattctaattcagaaattcttgcacttggttcaaatactgataaggttgaagctgcttttaattttgttttagaaaataatcatgctttccttgaaggagctgtttctcgtaagaaacaggtagttcctcagttgactgaaagctttaatgcttaaaattaggccataaggcctttttttagtcctctgattaatggtataatacttcttatgataatacaatttaacccaaacaaactatgtaagcaacctttttttatggaaatagtgaattatctatatcttaatcagcctgtgaccctgagagcaataaaaaggcagtttccttttcaaaagaatatcgataaattaattgaggagtttgtaaaagaaggctatatcgaacgattcgagaaacgttaccgtttattaattagtcttgtgtcggattcttctaaaattgatttagaacagcatttttttattaatgatgattctacttgttatttagaactattaaatcgtagatttgttactgagataagtaattctactaatgaagttgttattattgaacaaacgagtattacgagagacgatcttacgatttcaaattatttctataaattaagagaaaatctaccattattggaagagcagaatagattatatgatatattaggggatgttaatcccgaatattttttgaaacatgttacgacttttcttttaaaatacgttaggaaggaatatgcacttcaaaaaaggaggaatatttttgttgatgctttagaattattagggtatcttgttcaagtagaagaagggcgttatcttttgaatatggatttagattccgaagcattagtttttagtgcaaaaaaagactagtatcattactagtcttttttatgacaactttaacgattccttagttcaagataacgtttgtaccagatgttaacataagattgtgaaaatggccccttaacattgttaatccaatctaccaagattttaacatgttcctttaagatatagtcaatatcaggagagtaatgcatttcttttttatgtgtttcatactcatctacatctagcaattttttttcaccatcagcgaagactttgacatctaggtcatagtcaatatattttagtgcttcttggtccaaaatatatggactagctaaattgcagtagtaggaaatgccgttatccctaatcatggctataatattaaaccagtattttttgtggaaataaacaatagcaggttcacgtgttacccatcgtcttccgtctgcttcagtaacgagggtgtggtcgttaacgccaataacagcattctcagttgtctttagtaccatagtatcgcgccaagtacggtgcaaactaccatcatgcttataactttgaattgtgataaagtcgccttcttttggtaatttcatggcgtcctctttctacaataagggttatcccctttattgtatcataattttttgaaaagagggggaatacctataaatattctcttagagcggatgctatcgcatcaaagtcataaccttttcgggctaaagcttgtgtcaagcgttgcttaagctcataaccgtcgtattttttactaaatttttgatattgcttatcaatttcgttataaaggagagcttgttcattttcttcatctgcttcaagttctagatgatcgattgctagtttactttcttgaaatgaaaaacctttattgataaggctttgagttaatttatcttttagggctttagatggtagttttccctgatattttcgtaacagttttgaagctactttaatggctatttctgagaaatcaaattggcttaaaacatcgtcaatgatttgtttgttacaacctttttgaagccatttttgcttcagcacataggcccctttatcgcctgaattcagattttgttgagctagactttctaggagtttgtaatcatcaatccaatgattcttttttagattatcaataattttgggaattatatgagggtttatttcatgtttaaaaaggtaatcttttacttctttctcagtacgttgtttaaatgaaataaaatagagagctaggtttttaccatgcgagaactgagcaaaggatttaatatcctctagttgatctttgtccagtatcatttctttagtcaacatgtatttaacgatggtatcttctgtaacgtagagactctcttttttatctatctcaaggagataaagtctctttttcttctcgatttttgtgattttcatagttattattatatcaaaatgttagaatggtagtatgaatttacaagtgaaacagcgtatcccgcttaagataaaacgcatgggaatcaatggcgaaggcattggtttttataagaaaactctagtttttgtaccaggggctttgaagggtgaagaggtgttctgtcagattgtttctgttaagagaaactttgttcaggcgaaattattaaagatcaataaaccttctaagtttcgtgtcgaacctgcatgtaatatttatgaagactgtggtggttgccagttaatgcatcttcgttatgataagcaattagagtttaaaactgacttgttaggacaagccttgaagaagtttaaaccggctaattttgagtcatatgacattcgtccaacaatagggatgaagcaaccacaacattaccgagctaaactacaatttcaaacccgttcttttggtggctcagttaaggctggcttatttgcgaaagggagtcatcgcctcattaatattgatgattgcctagttcaggatgagctaactcaagccattatgaataaggtgacaaatttgttagataaatacaagttaccaatttataatgagcgcaaaattgctggaattcgtactgttatgatacgacgtgctttgggttcaaatcaggtccagttaatttttgtaacctctaaatcagtttctttcacaaaattagttaaggaattgacggaaagttttccagaaatcgtaacaatcgctgtcaattataactattcgaaatctagtgaaatttatggacaggatactgagattatttggggacaagacacgattcaagaagaggtactggactataacttcgctctctctcctcgtgcattttaccagttgaatcctcaacaaacagaggtactctatggtcaggctgttgaagctttggatgtggataaggctgaacatcttattgatgcttattgtggggttggtactattggacttgcttttgcaaataaggtaaagagtattcgaggtatggatattattcctgaggctattgaggatgctaggaagaatgccaaatcacttggactggaaaatgctcactatgaggtgggtaaagcagaagatatcattccacgttggtacaaggaagggtatcgagcagatgctcttattgtggatccccctagaactggtttagatgataagctacttaaaacgatactggactacactcctgaaaaaatggtatatgtttcatgtaatgtatctactttggctagagacctagtttctttggctaaagtttatgatgttaattatatccagtcagtagatatgtttcctcatacggctcgaacagaagcagttgtgaagctaactaagaaaatgtgataaaacctaacataaaaaacaagaaattttcaaaattgttggaaaatttctttatttttctgaaaaataggagtataataggcttatcgattttttaaaggaggagcgtatgaaaaagagcttcattcatcaacaagaggaaatttcttttgtgaagaatacttttacacagtatttgattgataaacttgacgtcgttgaagtgcaagggcctattttgagtaaggtcggggatggtatgcaggataatttgagcggtattgagaatcctgtaactgttaatgtgcttcagattccagacgcgacatacgaagttgttcactcattagcaaaatggaaacgccatactttggctcgttttggtttcaatgaaggtgaagggcttgtggttaatatgaaggctcttcgtccagatgaagattcattggatgcaacgcactctgtttacgttgaccaatgggactgggaaaaagttattcctgacggacatcgtaatatcgcttatttgaaagaaactgttgaaaccatttataaggtcattcgtttgactgagctagcagttgaagcacgttacgatattgaagcaattttacctaagaaaattaccttcatccattcagaagagcttgttgagaagtaccctgatttgacaccaaaagagcgtgaagatgctattaccaaggaatatggtgctgtattcttgattggtatcggtggtgttcttcctgatggaaaaccacatgatggtcgtgcacctgactatgatgactggacaactgagtctgagaatggttaccgtggtttgaatggagatatcttggtttggaatgaacaattaggacatgcttttgaattgtcatcaatgggtattcgtgttgatgaagatgcccttaaacgtcaggttgaaattactggcgaccaagatcgtttgaaattggattggcaccaagctttgttacatggccttttcccactaacaattggtggaggtattggtcaatcacgtatggctatgttcttgcttcgtaagaaacatattggtgaggttcaaacttcagtttggccagatgccgttcgtgaaacttacgaaaacatcttgtaaaaaaagcactaacgaaagttagtgttttttggtttgcaatagctatgcataattgattaatgaattggctattggagtagatatgataagagctggcttagtttttctcataaagaaaaaacctttcccctgaaggagataggtttttagattagtcgccactacggaaaaaggcatcataaagagctctgacggctgctttttcttgctcagtttcaattacaaacataacagaaacctcactagaaccttgagaaatcatttctaggttaatatgtttttcagagagcgctttagctgctgtcgctgtaacaccgatgtggtctttcatattttcaccaacaatcatgagaattgaaaggccatgttcaatttcaacttcatcaacaccgagttcacgagtcaagtatgaaaggatttcttgttctttgattggggtaagttcacgttctcgaataatgattgaaagatcatcgattccagaaggcatgtgttcccaacggatgtttaaatcttccaagatttgaagcaccttacgtccaaaaccgacctcacggttcataaggtatttgctcatattaatacttacaaatttgtcatcactagcaataccaacgacaggaactgttgcacccttgtgctcaagaataatacgagtaccaggatgagatgggttatttgtgtttttaataacgagcggaatcttaccacggtaggcagggaggagggcttcatcatgaagtacagagaagccagcataagccaattcacgcatttctttgtaagtcaactctggaattgaatgtggttcatggacaaccccaggatgggctgcgaaaataccatctacatccgtaaagttttcgtataaatcagctttcacacccgctgcaacgatagatcctgtgatatcagagcctccacgcgagaaagtacaaatttgattatcaggggtaacaccaaagaaaccagggattacaagaacctcatctgattcacgaagctcctccaacttgtcataggctcctggaaggatacgagcattcccaggttcgcttgagacaaaaataccagcttggcgagggtgaacgtaacgtgcttcaataccgttattacggaaatattcagcgatcaattttgcgttattatcttcccctgcagctaggaaagtatcataaaggaaatcattatcttcaatcggaagagtggcaagatcgttgatagatttggcaatcttcgccatttctgttgatttgaagcctagctcatcgaccatagcttggtagcggttaataatccattcttggtcagctttgacatcaacaccctttgtgtagtgtttatagtatttaatcaaggcatctgtgactttggtatcttcatcgttacgtttacctggggcagagacaacgacaaagcgacgttcagggtcagattttacaatgtttaagactttttctaattgtgtggctgaagcaagtgagcttccaccgaatttgatgactttcatagttactccaaaaattttaaattactctacaattatagcaaaattctgacaatttgtcacattgtttttaaaagcgagtaagatttagtctgattatggtacaataaagtaagaaagaggaggatatcccgtggtagaggcaattatttttgatatggatggtgtcctttttgacactgaaaaatattattatgatcgacgtgcaagtttcttagctcaaaagggaatttcaatcgaccatttacccccgtctttctttataggtggaaatactaagcaagtttgggaaaatattctcagagatgactatgataactgggatgtgccaactttacaagaagagtacaatgcttataaacaagacaatcccttaccctataaagaattaatctttcctgatgttttaaaagttttgaatgaagtgaaatctcgagggttgaaaataggtttggcttctagctcagtgaaggcagatattcttagagctttgaaggaaaatcatttggatggtttctttgatgttgttctttctggggaggaattcaaagagagtaaacccaatccagagatttacctgacagccttaaatcaattaggcgtcaaaccaaatcaagctttaattattgaagatagcgaaaaaggaattgctgctggcgttgctgctggcgttgaggtctgggccataaaagataatcgttttggcatggatcagggagcagccaaaggtttgttggataacctcatagatgttttggacttattggagtaacagagacaccgagttgtagaactcggtgttttgatatatcaaattaaaaaactctaagtttctgttgacctttaggtggactatggtatactagaaaataacgatgaatgatttgataatcaaattatctattcatcaaataaaattgtataaaaaacataaagaacatgcggttttcatataggaactagttatcggaggaatgtaaaaaatggcttacgaaacaattctttatagtgttgaagagggagtagcaactttgacacttaatcgtccagaagtgcaaaatgggtttaatattccagtttgtgatgagattatggctgcaattgaggaagctaaacaagatgcgtcagtaaaattcttggtaatcaacgctaatgggaaagtcttttctgttggtggagaccttgatcaaatgcaaaaagcggttgctgtagatgatgtacagtctttggttcgtattgctgagcaggtaaatgaaatttcatttgctcttaaaaaattgcctaagccagttattatggttgttgatggaccttgtgctggtgctgcagctaacttagctgttgcagcagactttaccattgcatctgataaggctaaattcatccaagcttttgtaggtgttggtttggcacctgacgctggaggtctttaccttttgacacgttcaattggtatcaaccgtgcgactcaaattaccatgacaggagagccagtatcagctgaaaaagccttggactggggaattgcctataaggttgtcgaatcagaaaaacttgaaaaaacagttagtcagctgattaaaaaattgaaccgttcttcagtgaactccttcaaagctattaaagagatggtttgggaatctgaatttgcaggatgggaaaattatgctaagttggaacttgacttgcaaaaatctcttgcctttacagaggacttcaaggaaggggttcgtgcttatagtgagcgacgtcgacctaaattccaagggaaataaccacattttctaaaagaaaaactaaagttttttaatcgggcttgcgaatttagtttgagtctgatataatttgaaagtcaaagttttattgaaaggagtctggtgtgaattacgacaaaattgatggctatcttgttgacatttttaataacgtagttattatcgaagaagcaagtttgaagaattcaaagtttaacgatgtttccctcaaggaaatgcataccattgatgtgatcggtacacatccagatacgacaccaagtgcagtagctaaagaactcatgctaacgcttggtactgtaacaacttctctcaataaacttgaaaagaaaggttatattgtccgtacacgttcatcggttgaccgtcgtgtggtccatctatcactttctaaaaagggacgtttggtctatcgtcttcaccgtcgttttcataaatcaatggtgatgaggattacggaaggctttaatgacgaggaattgaaggttatgagcaagggattggaaaatctccacgcctttcttgaggagttgaaataatggcatttgcaaaaatcagtcaggttgcccattatgcacctgctcaggtcgtgaccaatgatgacctatctaaaattatggatactagtgatgagtggatccgtactcgtacagggatccaagaacgtcgcatttcagttaatgagaatacgagtgatctagcaatcaatgttgctaagcaacttatagagaagtcaggggtatctcctgatgagctagattttgtcctagtggcaacaatttctccagatagcaatatgccatcagtggcagcccttgttcaaggagctgttggagctgtaaatgcatttgcttttgacattactgcggcatgtagtggttttgtctttgctttagcaactgcagaaaaattgattcgttcaggtgtttacaaaaaaggtatagtgattggtgcagaagttctttctaaaactttggactggtcagatcgtacaacagctgttctctttggtgatggtgcaggtggtgtccttttggaggaatcggaagaagaacatttctttggtgaatctttgaatacagatggtagcaaaggaggccttgaatcaggagcctctgcagtaatatcaccttattctgatgacatagaacagcctaatccttatttacaaatggatgggaaagcgatctttgattttgccgttaagacagtttcaaagagcattaaggccttggttgaagaaaaaggtgaacctgattacttcctgcttcatcaagctaacattcgtattttggatattatggctaagaaaatcgatgtcagtcgtgataaattcttggcaaacatgatgtcttacggtaataccagtgcggcaagtatcccaattttgctttctgaaaacgtggcaaatgggaccttaaaattagacagcggtcaaacaattcttttatcaggttttggtgggggtttgacatggggcagtcttattgttaaaatctagttatataaattatgcaccagcatagattataagaaatatatttatcttaaaggagaaattaaaatggcagtatttgaaaaagtacaagaaatcatcgttgaagaacttgggaaagacgcagaagaagtaaaagtagaaactacttttgacgaacttgatgctgactcacttgatgtattccaagttatctcagaaatcgaagatgaattcgatatccaaatcgaaactgaagaaggtcttaacactgttggtgaccttgttgcttacgtagaagaaaaaactaaataagcagggcatagagaatattcttatttgggatattctcctttgtttatacaattactttgattattaaactatttatttgattagaaaatcgaaaaaaaggtgaaaaatgaaatctcgtattacagaactgttaggaattaaatatccaatcttccaaggtggtatggcttgggtcgctgatggtgatctagcaggtgccgtttcaaatgctggtggactcggaattattggtggtggtaatgcccctaaagaagtggtaaaagctaatatcgatagagtgaaacaaatcactgacaaaccattcggtgttaatatcatgcttttgtcaccatttgcagatgacatcgttgacctcgttatcgaagagggtgttaaggttgttacaacaggtgctggaaacccaggtaaatacatggaacgcttccacgaagcaggtatcacagttattccagttattccatcagttgcacttgctaagcgtatggaaaaacttggtgctgatgctgttgtcgcagaaggtatggaagctggtggtcacatcggtaaattgacaactatggctcttgttcgccaggttgcggatgcggtatctatcccagttattggtgctggtggtgttgctgatggacgtggtatggctgctgttcttatgcttggagcagaagctgttcaggttggtacgcgtttcgctgttgctaaggaatctaatgctcaccaaaacttcaaagataagattttgaaggctaaagatatcgatactgttatttcagcttctgttgttggacacccagttcgtgcgattaagaataaattggctacagaatataaccaagctgaaaaagatttcttggctggtaagaaaactcaagaggaaattgaagaacttggtgcaggtgcccttcgtaacgcggtagttgatggagatgtggaatatggttcagtcatggctggacaaattgcaggtcttgttcgtaaagaagaaacgtgtgcagaaatcttggaagacctttacacaggtgctgccaaggtgattaaagaagaagctgctcgttgggcagatgtaaacgtctaaaaaacgcagaaaggattaggatagtgacaaaacgtgcgttcttatttgctggtcaaggggctcagaaattgggcatggcgagcgatttgtatgcgacttatcccgttgtaaaagagacatttgatacggctagtcgtattctaggttatgatttgcgtgaattgattgattctaacgaagaaaaacttaatcagacacgctatactcaaccagctattttgacaacgtcagtagccatttatcgccttttggcagaaaatggtatcactcctgatattgttgccggtctctctttgggggaatattctgccctagttgcggctggagcactctcatttgaggatgcggtagccttggttgctaaacgtggagaattcatggaaacagcggctcctgctggaagtgggaaaatggttgcagtcatgaatacagatccaagtttgattgaagaaatctgtcaaaaagcatctgaaaagggtgtagtaacgcctgctaactataatactccagcacaaattgttattggtggtgaagttgaggctgttgattatgctgtggaattgcttaaagaagctggtgctaaacgtctgattcctcttaatgtttcaggaccgttccatacagctttacttgaatcagctagtcaaaaattggcagcagaacttgagaaagtgtcattcaatgactttaagcttcctttggtaggtaatactgaggctcaaatcatgaagtcagaagacgtcaaagcacttttggctcgtcaggtgatggaacctgtacgtttttatgattcgattgccactatccaagaatttggtgtagatgaagtgattgagattggtccaggaaaagtcttgtcaggtttcttgaagaaaattgataaaaccctaccaactcaaaatgttgaagatcaagctagtcttgatgcccttcttaatgcgtaaaacgaggtaaacatggaacttaagaataaaaatgtttttgtaacaggttcaacacgtggaattggattagctgtggcacacaaatttgctagtcttggtgccaacgttgtcctaaatggacgttctgagatctctgaggacttgcttgcacagtttgcagattatggtgtaactgttgttggtatctcaggtgatatttctaatggcgaagatgctaaacgtatggttgcggaagctattgaaaagcttggtagtgttgacgtgctagttaataatgctggtatcactaacgataagttgatgttgaagatgactgaagaagattttgaacgtgtcttgaaaatcaacttgactggtgccttcaatatgacacaagctgtcttgaaaccaatgtctaaggcgcgtcaaggtgccatcatcaatatgtcatctgttgtaggtcttatggggaatattggtcaagctaactatgcagcttcaaaagctggtttgattggtttcactaaatcagtagcgcgtgaagttgcggcccgtggtgtccgtgtcaatgctatcgctcctggtttcattgaatcagatatgactgacgctattccagagaaaatgaaagatgctatgattgctcaagtaccaatgaaacgtattggtcaagcagaagaagtggcagaagttgcagcattcttggctagtcaagaatatctcacaggtcaaaccatcgctattgatggtggtatgactatgcaataattgattttcaatatcaaaaaatcatttactagaatatccatccgacaaaaggagaatatatatgtctacaaatcgtgttgttgttacaggttacggcgtaacctcaccaatcggtaatacaccagaagaattttggaacagtcttcatgacggtaaaattggtatcaagccaattactaagtttgatgcttctgaaattccagtatttaacgctggtgaaatccaagatttcccgtttgataaatactttgtgaaaaaagatactaaccgtatggacacttactcactttatgcgatttatgctgctatggaagctcttgaaaattcaggacttaacatggaagaagaagatcgtgatcgtgttggtgttatcgtgtcatctggtatcggtggtctccaagaacttgaagatcaaatcattcgtatgcacgaacgtggtatgaaacgtatcaaaccaatgtttatccctaaagcactctcaaacatgggtgctggtaacattgctcttaaaattggtgctcaaggggtatgtaaatcagtgacgactgcttgtgcctctgccaatgatgcaatcggtgaggccttccgtgaaattaaattcggtttgcatgatgttgtcttggctggtggtgctgaagcttcaatcactaagattggtatcggtggtttcaatgctcttacagcactttcaacaacagaggatccagaacgttcatcaattccatttgataaagaccgtaatggttttgttatgggtgaaggtgcaggggttctcgttatcgaaagcttggaacatgctcaaaaacgtggtgctaacatcttggctgagattgttggttacggatcaaactgtgatgcctaccacatgacaacaccaactccagacggttctggtgctgctaaagcaattaaattggctatcaatgaagctggtatcaaacctgaagatgttgattatgttaatgctcacgggacatcaacaccagccaatgaaaaaggtgaaagtggtgccattgtttctgtacttggtaaagatgttccagtttcatctactaaatcatttacaggtcacttgttaggtgctgctggtgcggttgaagctattgcaacaatcgaagctattcgtcatagttatgtaccgaaaactgctggtacaaaagaattgtctgactacatcgaagctaatgttgtttatggtgaaggtcaagaagctgatattgagtacgcaatttcaaatactttcggttttggtggacacaatgctgttcttgcctttaaacgttgggaggcttaattcatgaatatttctgaaatcaaagatttgttggctcaatttgatgcatcaactttgcgtgaattttcatacaaaaacaatggtgaagaattgaacttgagcaaaaatcaaacaagttcagtaacagctgccccagtagctcctacagttgaagtagttgcgccagctcctcaggctccggttgctccagtagcagcacctgctgctgttgaaactccagcaacaccagttgaagaagcttctgcaccagctcaagctgctgaaggagaagtggttgaaagtccacttgtcggtgtggcttacttgtctccatcacctgaaaaaccagcctttgtttctgttggagacactgttaagaaaggtcaaactcttcttatcgttgaagcgatgaaggttatgaatgaagtgccagcacctaaagatggtgttattactgaaatcttggtagcaaatgaagaagttgttgactacggaaaaggattggtacgcatcaaatgacaattgatattaatgctattcgtgaagctttaccacaccgttatccaatgcttttggttgaccgtgtgctagaagtttcagaagacgaaatcacagctattaaaaatgtaacgatcaatgaacctttctttaatggacattttcctcaatacccagttatgcctggcgttcttatcatggaagctcttgcgcaaacagctggtgttcttgaattgtctaaacctgaaaataagggcaaattagtcttttacgcaggtatggataaggttaaatttaaaaaacaagtggttcctggtgaccaacttgttatgacagctaagtttgttaaacgtcgtggaacaattgctgttgttgaagctaaggctgaagtcgatggtaaacttgctgcatcaggtactttgacttttgctattggaagctaatgttttgtgaaaatccttctggcgacagtcggaaaggatttttctttagacattggtctatcacatagaaaggaaatcaacacagactatcaaaaaatgtctgatgttatcttgttttatgtttaaaaaattattgattgccaatcgtggtgaaattgcagtgcgtattatccgtgcagcgcgtgaattgggtatccaaacggttgctatttattctgaagcagataaggattctctccatactatgcttgctgatgaagctatttgtatcgggcctgcaaaatcaacggattcttatttgaatatgaatcgtgtcctatcagctgctattgtgactgaggctcaagctattcatccagggtttggtttcttgagtgaaaactctaaatttgccactctctgtgaagaaatgaacatcaagtttattggtccttcaggcgaagtcatggacaagatgggtgacaaaatcaatgcccgtgctgaaatgattaaggctaatgtccctgtaattcctggttcagatggtgaagtctttacagctgaggaggctttggaagttgccaaccgtcttggttacccagtgatgcttaaggcttctgccggtggtggcggtaaggggattcgtaaggttaacactgaagaagagttagctccagctttcgaatctgcgtcacaagaagctaaagcagcctttggtaatggggcgatgtatattgaaaaagttatttacccagctcgtcatatcgaggttcaaattttgggagatagctatggtaatattgttcacctaggtgagcgtgattgctctcttcaacgtaataaccaaaaggtcttggaagaatcgccttcagttgctattggtaagactcttcgtcacgaaattggttctgcagctgtccgtgctgctaaggctgttaattatgaaaatgcgggtactatcgagtttcttcttgatgaaaaaacaggtcagttctacttcatggaaatgaatacccgtgttcaagttgagcacccagttacagaatttgtaagtggtgtggatattgttaaagaacaaatccgtattgccgcaggtgaaaaactctctgtgacccaagatgatattgaaatcaagggacatgctattgagtgtcgtatcaatgcagaaaatcctaagttcaactttgcacctagtccagggaaaattagcaatctctacctacctagtggtggcgttggtctccgtgtagacagtgcagtttatcctggctatactattccaccttactatgattcaatgattgctaaaatcattgttcatggagagaatcgatttgaggcactcatgaagatgcaacgtgctctttatgagctagaaatcgatggtgttgtgactaatgctgacttccagttggatttgatttcagatcgtagcgttatcgctggggattatgatacttccttcttgatggagaccttcctaccagattatcagaatcgtgaggaataaagtttatgggattatttgatcgaaaagaaaagtatatccgtatcaatcctaaccgttctgtacgtaatggggttgatcaccaagtgccagaagttccagatgaactttttgccaaatgtcctggttgtaaacaagctatttatcaaaaggacttgggacaagctaaaatctgtccaaattgttcttataccttccgtatttccgctaaagaacgtctcgatttaacggttgatgagggttctttccaggaactttttacaggaattgaaaccaaaaatccattgaatttcccaggttatatggagaaattagcggcaaccaaggaaaaaacgggtcttgatgaagcagttgtgacaggcgttgcaactatcaagggacaaagaacagccttagctattatggattctaactttatcatggcttcaatgggaactgttgttggtgaaaaaatcacccagctctttgaacatgcgattgaaaaaaaacttccagttgttatttttacagcatctggtggtgcccgtatgcaagaaggaatcatgagtttgatgcagatggccaagatttcagccgctgtaaaacgtcattcgaatgctggcttgttgtatttgactgtattgacagatccaacaactggtggagttacagcaagtttcgccatggaaggtgatatcatcttagctgagccacaaaccttgattggtttcgcaggtcgtcgtgttattgaaaacacagttcgcgaaactttgccagatgatttccaaaaggctgagttccttcaagaacatggttttgttgatgccattgttaaacgtacagagttggctgataccattgccacactcttatcattccatggaggtgttcaatgagcgatgtagcacgtattttaaaagaagcgcgtgaccaaggccgtttaactgctttggactttgcccaaggaatcttcgatgactttatcgaacttcatggcgaccgtaatttccgtgacgatggtgccattattggtggtattggtcgtttaaatggccaagcggttactgtagtgggtatccaaaaaggtagaaacctacaagataacctcaaccgtaactttgggcaacctcatccagagggctatcgtaaggctcttcgcctcatgaaacaggctgaaaagtttggtcgtccagtcgttacctttatcaatactgcaggtgcttatcctggtgttggagcagaggaacgtggacaaggtgaggcaattgcgcgtaaccttatggaaatgagtgatcttaaggtgccaattattgccatcatcattggtgaaggtggttcgggaggagctcttgccttggcggtagccgataaggtttggatgcttgaaaataccatctactctatcttgagtccggaagggtttgcgactattctctggaaagatggctcacgttcagaagaggcagcagagttgatgaagattacatcaggcgagttgcttaatatgggaatcgttgataaggtgattccagaacgtggttactttacaagtgaaattattgaagcaattaagacagcaattgtagatgagttggcagaattaagccaattatcaacagaggacttgcttgaagcgcgttatcaacgttttagaaaatactaaaaaaacattgggatatatcccaatgttttttaaacggtatgacgttcgaaggcttggtctgagataccttgttcgaggataagtttagcccattccttagctgaatgaagactgtgatccttgtagttaccacaagattcaatggtagttcctggaacatcttcccatgtaatctcgttagcaatagcttcaagactagatttgataactttagcaatttctgtaggatcttgttttccccacataatcatgtggaagcctgtacggcaaccaaatggcgagcaatcaataagtccatcaatacgttgacggattagtttagcgagtaggtgttcaatagtgtgaagaccacctgtatcaatactattttcattaggttgaatcaaacggatatcgaagtttgtgatgatatctcctttaggtccaacttcctctgaaataagacggacataaggtgcttttacaatggtatgatcaagttcaaaactttcaacagtaacgtcttttggcatggtaatacctccctattctaatagagttatgataccacaaaatcagtttaaagttctagtatttatttgagaaatcgctataaatatgatacactagaagacggttttctttagggaaaccttagaaaagttgaggtaaagacatgataaacatgataattttagttgtctttgcactcattggtttagtcgttggatatttagcaatttctattaaacttagcaaagctaaggaacaagcagaaactaccttgctaaaggcagaacaagacgctgtgaaccttcgtagtcaggcagagcatgatgcagatcatctgcgtgtgactgctgaacgcgaaagtaaggctcaacgtaaagagttcttgttagaagcaaaagaggaagctagaaaatatcgagaagatattgaaaaagaattcaaatctgaacgtcaagagcttaaacaaatggaaaatcgtttgacagaacgtgccactagccttgatcgtaaggatgaaaatctatcaagtaaagaacttgccctcgagaagaaagagcagagtcttgctgacaaatctaaacatcttaatgagcgtgaagagaatgtgactcagttggaggctgagaagcaggctgaacttgaacgtgttggtcaaatgaccattgcagaagcgcgtgaggtaatcttaacggagactgagaataatctgactcatgagattgcaacacgtatcaaagatgcagaagcacaggttaaagatactgttgataagaaagccaaaaatttgttggcgcaagctatgcaacgcttggctggagattatgttactgaacaaacagttacgactgtccaccttccagatgacaatatgaagggtcgtatcattggacgtgagggtcgtaatatccgtacgcttgaaagtctaacaggtattgacgttatcattgatgatactcccgaagtggttgttctttctggtttcgatccagtgcgtcgtgaaattgcacgtatgactctcgaagccttgattaaggatggtcgaatccacccagctcgtattgaggagttggttgagaagagtcgtcaggaaatggataatcgtatccgtgaatatggtgaggaagcagcctacgaaattggcgctatgaatcttcaccctgatttgattaagattatgggacgcttgcagttccgtacatcatatggtcaaaacgtacttcgtcactcagttgaagttggtaaactagcaggtatcatggctggtgaattgggtgagaatgttgccctcgctcgtcgtgctggtttccttcacgatatggggaaagccattgacaaagaagtcgaaggtagtcacgtagagattggtgctgagtttgcacgtaagtacaaagaacatccagttgtggttaacgctattgccagccaccatggcgatgtagaacctgagagcgtcattgcagttattgtagctgcagcagatgctttgagttcggctcgtccaggggctcgtaatgaatctgttgagaattatgtcaaacgccttcgtgatttggaagaaattgcatcaagctttgacggtgttcaaacaagcttcgcccttcaagctggtcgtgagattcgtattatggttcatccaaacaaaatctcagatgatgaagttacaatcttgtctcacaaggtacgtgaacaaattgaaaagaatttggattacccaggaaatattaaggttacagtcattcgtgaattccgcgcggttgactatgccaaataagataagagagccgcaaggcttttttattttgcacttatactgaaaggttgtattctttttgaaaatgtaagaactttcttatcaaattgcgtcattttggtagattagtgttttgtaatgaaatattttgattttttttgactgtttttagttgacagttattaaaaattgagtataatagattctgtaaacgattacagaaggagagattatgctaaagtctgaacgtaagcagattatcttgtctcagttgaaacaagatggttttgtcactttggaaaacctaactgttttgttaagtgatacttccgagtcgacgattcgtcgtgacttggacgagttagcggcagatggccaacttaaacgtgttcatggtggtgctgaaagcattcatggtctaaaggaagaaattgccaatagtcaaaaagctattagaaacgttcaagaaaaggctcagttagctggttatgctgccgatttgattaaggaaggtgatgtcgtctttcttgaggctagtacaacaaatgaacttttgattccacatttggccaatcgtcaggtaacggttgtgactaattctatccatcatgcggttaagctggtagatctcggtgttagcactaggattgttggaggaaaggttaaacattcaacggatgcgtctattggaagtactgctcaagagcaaatcagacaactgaattttgattgtgctttcattggtgctaatggtgttgatgctcattatttcaccacaccagacatggaagaggcagtcatcaaacggacggttatagctaatgcgcaaaaagcctatgttctagctgatgcctctaaacttggtcagattacctatgctaaggtagctgaggttgaaaaagtaaccataattacaaatgcttcggaagaagagctcctaaaagaattaaaagagaaaacgagggttattgaagtatgatttatactgtaacgctgaatccatcaatcgacttcattgttcgtatcgataaagtagagattggtgaagttaaccgtatggagagtgatgataagttcgctggcggtaagggtattaacgttagtcgtattttgcaacgcttaggtgttgataatactgcaacgggcttcatcggtggttttacaggacgttttgtgacagatggtttggatgcagagggcattaaaaccaagtttgtagcagtggatcaagacacacgtattaatgttaaaatcaaggctgaccaagaaactgaaattaatggtgcaggacctgtcattaatgagtatcaattggctgaattggaagcagttctttcaagtgtaagtgccgatgatgtggttgtttttgctggatcagcaccaagcaatcttggaaataaggtctataacaaattgattccactagtgcgtgaaacgggtgcacaggttgtctgtgactttgaaggacaaaccttgcttgattccttggcttaccaaccactcttggttaaaccaaataaccatgagttagaagctattttcaatgtcaaacttaatggtttggctgatgttgaaaaatatgcgcgtgaaatccttgctaagggggcacagaacgttatcatctcaatggcaggtgatggagcgctgcttgtcacaccagaggctgcttattttgccaaaccaatcaagggaacagttaaaaactctgttggtgcgggtgactcgatggttgctggtttcactggtgagtttgttaaatctggtgatccgattgaggctctcaagtggggagtagcgtgtggaacatctacagctttctcagatgacttagcgacaattgaatttattaaagaaacatacaataaagtagaggtagaaaaactatgaaaattcaggatttactgaacaaaaaagtaatgttgcttgaccttcaagcaactacaaaagaagctgctatcgatgaaatgattaacagcttggttgacaatggtgttgtgactgactttgatgttttcaaagcaggtattatggctcgtgaagcacaaacatcaactggtttgggtgatggaatcgctatgccacacagcaaaaatgctgcagtaaaagaagcaacagtactttttgctaaatctaataaaggtgtagattacgaatcacttgatggtcaacctacagacctcttctttatgattgctgctccagagggagcaaatgacactcacttggcagccctcgctgagttgtcaaaataccttatgcaagatggttttgcagatcgtttgcgtaaggtgacttctccagatgaagtgattgctgctttcaatacgggtgaagaagaagcacaagctgaggaagctaagaaagcacaagctgttaaagaagcagcttcaagcgataaaccacttatcgtagccgtaacagcttgtacaactggtattgctcacacttacatggctgaagaatcactaattaaaacaggtgaagaaatgggtgtcaatgttcgtgttgaaactaacggtgcttcaggtgtcggaacaccattgactgctgaagaaatcagtaaggctgtaggtgttatcgtagcagcagacaaggcagttgaaacagcacgtttcgatggtaaaaaattgctttctaaaccagtcgctgcaggtattcgtcaacctcaagagttaatccaaaacatcttggatggtaaagctgaagttttccatgctgaaaatgctggatctgctcaagaatcaagtgagaaattgagccttggtggtgccttctataaacacttgatgagtggggtatcacaaatgcttccattcgttatcggtggtggtatcatgattgcgcttgccttcttgcttgaccaaatcatgggtgttcctaaagatcaattgtcacaacttggttcttaccatgaaattgctgctcaattcaagacaattggtggcgctgcctttggcttcatgcttccagtacttgcaggttacattgcttactctatcgctgaaaaaccaggtttggtatcaggtttcgtagctggtgctattgcttcaagtggtgcagcctttggtggtgttccatttgcttcaggtggtaaagcaacccttgcccttgctggcgtatcttcaggtttccttggagctcttgttggtggtttccttgcaggtggtgttatccttgttcttcgtaaactcttggcaggtattccacgtgcccttgaaggaattcgttctatcttgctcttgccacttcttggtgtatttgctactggtttcttgatgttggcagtaaatatcccaatggcagcaattaatactggtcttaataacttcttgtcaagcttgtcaggaagctcagccgtactacttggtctccttgttggtggtatgatggcagtggatatgggtggaccagtcaacaaagcagcttatgtctttggtacaggtactctcgcagcaacagtaacttcaggtggttcagttgttatggcagcagttatggcggctggtatggttcctccgttggcagtatttgtagcaacactcttgtttaaagataaatttactgaagaagaacgcaactctggtttgacaaacattgttatgggactttcattcatcactgaaggtgcgatcccatttggtgcagctgacccagcacgcgctatcccaagctttatcgtcggttcagctcttacaggtgctcttgtaggtatggcaggaatcaaattgatggcaccacacggaggtatcttcgttattgccctaacatcaaatgcccttctctaccttctcttcatcttgattggtgctgtggtatcaggtatcctcttcggattcctccgcaaaccacttgataaataagatatgacaaaacaatctcgttgtgacgggattgttttttgtgtcgtagcagatttttgtcagggtacctattttatgataaagtataggcagaaatggcttatctagtagctaatacgctgtataaagcaacataagaggtaaaatatggtaaaagaatacgattatattgtcattggtggtggttctggtggtattgccagtgccaatcgtgctgccatgcatggtgctaaggttattctctttgaaggaaaagaggtcggaggtacctgtgtcaatgtaggttgtgtgcctaaaaaggtcatgtggtatggtgctcaggttgctgaaacccttcaccgttatgcaggtgagtacggttttgatgtgacgattaataagtttgattttgcaaagcttaaggccaatcgtcaggcttatatcgaccgtatccatggttcttatgagcgtggttttgatagcaatggcgttgaacgtgtatacgagtatgcaagatttgttgaccctcatacggttgaagtagcgggtgagcgttatacagcaccccatatcctaattgcgactggtggtcacgccctttatccaaacattccaggtagtgaatatgggattacctccgatggtttctttgaactagatgaggtgccaaaacgtacagctgttattggggctggctatattgccattgaggttgctggtgttctcaatgctcttggaagtgatacacacctctttgtgcgtaaagatcgtccattgcgtacctttgataaggatatcgttgatgttttagttgatgaaatggctaaatctggtccaaccctccatacgcatgctaatgcgacagaggtagtgaagaatgcagatgattccttaaccattagttttgataatggagaaacgattactgttgattgcctcatctgggctattggacgcgcagccaacacttctggttttggacttgaaaagacaggtgttaaattgactgaaaaagggactatttattcggatgaatttgaaaatacatctgttcctggaatctatgcccttggcgatgtgactggtaaacttgatttgacaccagttgcagtcaaggcgggacgtcaattgtcagagcgactcttcaacaataaagctgatgctaagcttgattacactgatgtagccactgtggtctttagccatccagttattggttctgttggcttgactgaagaaaaagcaatcgctaaatatggtgaggagaatattaaggtttataaatcaagtttcacaccaatgtatacagcccttggagacaatcgtcagccttcaaccatgaaattagtaacgcttggtgaggatgaaaaaatcatcggtcttcacggtattggctatggtgttgatgagatgattcaaggtttctctgtggccattaagatgggagcaactaaggctgattttgataatacggttgccattcacccaacaggttcagaagaatttgtaacgatgcgatagaaaagtgaagtctgttaactgagagtttcagacttttctttgtgtctgaatggcttcaattgaaaccattcactcaacgggctcagaagaatttgtaacgatgcgataggaaagtgaagtctgttaaccgagagtttcagacttttctttgtgttcaaatagcagcctacactttgtgtaaaactatagattgtctaaataaaaaaggccttcaggccttattttatttaattaagtagtttcttactgctgagataaagtaaagagatccagtgacaacaaataagtcctcaggatctgatgattcagcttgtgctagccagtctctatagtcggctacacgtttgaagtctttgggatagtcgtccaagggcagtgcctcaaaaaagtcaaagctggttaccgttatatcataatctttcaattcctctagtaagtctgccaaaggctttcgtctaagtcctgcaaagaggatatgtaccctacgattagcgaagttatcttttagtacctgttttaagctggcaattccttgagggttatgagcaccatctagataaatgttatttcctatccactcactacgaccaggccaatgcgtctcttcaatcccctcttggatgctcttatcggtaatcttagaaaatgtttgagctaggagatgggcagcagtgacagctagcccagcattgttttcttgatgctgccctaacattggaagtttaagatttggactttcccaatggtcataagaaatttggatcgttcgattgtctttcggaagcagctgaatttccttatcaatgacggctaaagaagcttgtaggtcatgtgattttttattgaagaaatgttcaacttctgtagagacccgaccaagtaagataggtgtgttttctcgcatgacgcctgccttatgattggcaatgtccaaaaggctattgcccaaggtttcagtgtgatcaaagccaatcgaagtacagatgacaagctctggcgaaagaacattggtcgaatcaaggcgtccaccaatcccagcttcaatgatagccatatcaacctgtttaaggtcaaagtagaggaacatgagtaaggtgaccaattcaaattctgttggtcggccaaaatcagtgtactcttctaaatcattgactaggacttgagctttcgcgacaaggctaaccaaatccttatcaggaatttctgtgccgttaatactaatacgttcgttgaagcgagtaatataaggggaggtgaaagtaccgacttgatagcccgactttgttaggatattttgtagatagctagttgttgatcccttaccgttggtaccgacaatatgcaccgttggaaagtgagtctgaggatttccggcttgtttcaagagccaacgcatacgttcgagttgagggcgacggccattgcccttgaaagaatggataatatttagagtttctgtatagttcataggattatagaaaaaaggcagggtttcctagccttttacctgtcttagttagaagtggcgtcaccagttgttgcaccaccagtagtcgcattgccagatgttgtgtctgcagtagctgctgatgaagaggtagtcgtattgccacccgttgttgtgtctgcagatgacgaataggtgttagttcctgcttggctacttgtttctgtttctgaatcagtcgcattgccataactagatgaagcggcgctggattcttgagtcttattattgccttctttgatgactacagttgattgattggctgatgaatcagaagtgtccttatttttagaggctgtgaaattcatgatggtgattgaagccacgatgattgacaaaatcgtcccgacggcagtaaggactttttggaaggcagtgaagccttttgtaacgtgttcagtcacctttggggcagattttttttcttcttttgatgaatgattacggcgtgagtaattttcagacatgatgctctccttaaaaatatttcgtactttctattatatgattttctcgcaaaaattgctaaaaaaattatgctataataaatagtaaataaaaatcgaggaaaaatcatgatttattttgataattcagccacgacggtgccttatccagaggcacttagaacctatcaagaagtggctactaaaatttttgggaacccatccagcctacaccaattaggaacatctgcgacacgtattttggaggcttctcgtaagcaagttgcggaactcattggaaaatcagccgatgagattttctttacgtctggaggaaccgaaggtgataactgggtcatcaaaggtgtagctttcgaaaaagagccttacggcaaacacatcattgtttctgatattgaacaccctgcggtaaaagaatctgccaaatggctttcagagcatggttttgaggtatcctatgcaccagtaaatgagcaagggtttgtggatgttgaagctcttgctggattattgcgctctgacacgattttggtttcggttatggcagtcaataatgaaatcggatcaatccaacccattcaagccatctcagatctcttggctaatgagcctaccatatctttccatgtggatgctgtccaagctattggaaagattcctgtatcgtcatatttaactgaccgtgtagattttgcgactttttctggtcacaagtttcatgctgttcgtggtgtcggttttgtctacaaaaaggcagggaaaaaaattacgccactcttaaccggtggtggtcaagaaaaagattttcgttcaactactgaaaatgttgctgggattgcgagtatggccaaggccttgcgcttggtaactgacaaagaggaattttctcttcctaaaattgccaagatgaaaaagattatctttgacgaattggctaagtacgaggatattactattttctcaggtgagggtgaagactttgctcccaatattttgacctttggaatcaagggtgttcgtggtgaagttattgtccatgcttttgaagagcatcaaatctatatttcaacgacatcagcatgttcatctaaggcgggtaaaccagcggggacccttatttctatgggtgtaccgactaagttagctcaaacagctgttcgtatcagtcttgatgacgacaatgatatgggacaggtggaacagttcctcacgattttcaagcaggtctacgccaagacacaaaaagtgagatagcaagatttaatcgactaaacaataaaactaaattcgaatttaaaaggaaaaggaatgacactaacatattcagaaattatggttcgctatggtgaattgtctactaagggcaagaaccgtatgcgctttatcaataaacttagaaataatattaaagatgtcctatccatctatccagaagttaaagtgacttttgatcgagaccgtggacatatctacctcaatggtacagactacgagccagtagcagagtctttgaagcaaatttttggtattcaagcctttagtcctgtttacaagtttgaaaaagatgtcgaggtcttgaaaaaagctgttcaagacattatgactggactctatcgtgatggtctcacttttaaagtaactgccaaacgtagtgaccatgactttgttctcgacagtcgtgagctcaatcttactttaggaaatgcagtttttgatgtattgcctgacattaaggctcagatgaagggaccagatgtcaaccttaaggtagaaattcgtgctgaggctgcttatatttctcacgaggaaatcaaaggagcaggcggcctacctgtaggtactgctggtaaaggaatgctcatgctttcaggtgggattgattcgccagtggcaggttatcttgcccttaaacgtggtgtggatattgaagctgtccactttgcaagtcctccttacactagtcctggagctcttaaaaaggctcaagatttgacccgtaagttgactaaatttggtggtaatattcagttcatcgaagtaccatttactgaaattcaagaggaaatcaaagaaaaagcaccagaagcttatttgatgaccttgacacgtcgctttatgatgcgtattacggaccgtattcgtgaagaacgcggaggtcttgtgattatcaatggtgaaagtcttggtcaggttgctagccagactatggagtctatgcaggcgattaatgctgtcacatgtacgccagtgattcgtccagttgtcactatggacaagttggaaatcattgatttggcacaaaaaattgatacctttgacatttccatccaaccttttgaggattgctgtactatctttgcacctgaccgtccaaagactaatccaaaaatcaaaaatgtcgaacaatatgaacgtcgtatggatgttgacgccttggttgaacgtgcggttgcaggaatcatggtgactgaaatcacacctattgaagaggcgcaagacgaagtggatacacttattgaagacttgctataatctaggagtataaaggactaacttagtagctcttaagtgctactagggttagatatgtcgaaaaagaaatgtcgatgttgaacttttacccagaaaggaaaatacatgaccgtttataacatcaatttaggaattggttgggcatcaagtggtgttgagtacgcccaggcctatcgttctacaattttcaaaaacacaggtattaaggccaaatttgtctttatggatatgttcttgcaggacaatctttctgatttgacccgtaacatggggtttgcggatgaagacatcatctggctctacagctattttacagacctaaaaattgctccaacgacctatactgtcaaggatttggaaaaggaaattccttatgacattacgcgtcgtgagattaatggtaaagtggttaagctcttttgtgccaaagaagatattttttatgcggcctacttgcgtaaagagggtgaagacatcgttcaccgtgtggaaaaagtatcgcgtggttgcctaatccgtaaagacttttattcttacactaagatgttcacggagtactacacaccggtagataataaggctcacctttatcaacgccgtttcttcaatgaggatggtagtgttgcttatgatgagattgttgatggtaaggatagtgtcttccgtttcccagataagattttgtcatctaagcatgaatttatcgcctacttcatgtcgcaacttggtctaactgaccaggatatcgttatcttggaccgtgcaactggtacggggcaggctgttttccgtaataccaaacctgctaagcttggggttgtggttcatgcagagcactttagtgaaaatgctgtgacagataagacgattttatggaataacttctacgagtaccaattcagcaatgcagataaggttgatttctttatcacagcgacagaacgtcaacgcagcattatgctcgatcagttcaataaatacacaccatttacgcctcatatcgtaactatccccgtgggaagtgtggataaactgagaaagcctgaaggagagcgtaaaccattctcaatcatcacagcctcacgtttggccaatgaaaaacacgtggactggttggctaaggctgtcgttaaggctaaagaaagtctgccacaagtaaactttgatatctatggaacaggtgctgaagaggctaaacttaaggccattatcgaggaaaatcaagctcaggattatatccaccttaaaggtcaccaagacttgacagaagtctacaaggactacgaactttacctatcaggttctaagagtgaagggttcggtttgacacttctagaagccgtgggatcgggtcttggtatgattggttttgacgtacgctatgggaaccaaacctttatcaaggacaatgaaaatggctacctcattcctcgttttgaaaaagatgatgagcctgctatcgtggctgccttggcagagaaaattgtagccttcttcaatcgctcagatttggatcatgtgcatcaagtctcttatgatattgccaaaggctttttgacagaggaaatcgagcagaagtggcttaacttagtaaaggagatgactagtcatgattaatttatttgaaaactatagtcagggtagttgggatctccattactcactgattgtcgctggctatgtaaatacaacagtttgtctttcagatgatggttttttgcctagtgatgtgacctcaccttacctttatttcactggttttgacaaggttcaaggatctgcactttactttaatcaagtgcctgtgcctgactattgggaaattttaggaacaaatagtaatgcggaaattttccgctttgataagaaacgtggtcatattcattatgcgcatcctgctcaccaacgactggttaaagcggtagactggtatgatgaatcaggacgcttgcgcgtgactgatcgctacaataacaaggggtaccgtttctcacaaacaacctataatgttaagcaagaagcgaccattacgagctatttcactcctgacaacaaggaagttatcgtcatcaaccatttgactaaagacgttatcttgaattggaaagacaaggtctacattttcaaaaataaatctgaatttgtagtcttctatcttaaagaagctggttatgatttgagtcgtattctatacaactcattggcgacacctttcttgacaactatgaatcttccaaattctggtcaagacgttctcttctggcaagagccaatcactgattcagttcctgggaatatgcgtctgcttcttgagagcaaccatcgtcagactaagattgttgtacaagattacacagcttatacgaatcttctaaagttggttagtccagagcaagcttctcgcgtggccttccttggcttcatgtatccgtttgcccgtcagaacaacttccaaaatcaagcgcttatcttgaccaactcagatcagattgaacatttggaaagcattgtcagtgaagtgcctaccatgcactatcatgttggggcaatcacagaaatgtcaagccgcttaatggatttggctaaatatagtaatgttagcctttaccctaatattacaacagagcaggttaagcgtctttataaggaagcggatttctacttggatattaaccatcaaaatgaaatcttgtcagcgacacgtgctgcctttgaaaacaacttgcttatccttgcctttacgaacactagccatggtcctgaatataccgcaccaagtaatatcttctcaccaatgaatgctgggcaatttaagcaaacacttaaagaagccttgggcaaccgtgatttccttagtcacttgcttgatcgtcaacgtgagcatgctcatgtagcaacaccagaagattataagaaggttattggttagggaaatgacattagaggttcgtaacatttatcctctgacaccaacatttaagaaggtcgcttcgctttatgaagcggcttttcctgtggaggagcgtcttccactctggcaattgtcttggaacagcttgaaaagaggacaatctttcttggcctattttgatcagggagtcttcgttggcttgacctataccatttatactgacaacctggtctacctactttttcttgcagttgaggaaagtaaacaatctcagggatatggcagtcagattttggcacaagttaagaaagaagcagggggacgaccgtgtgtgcttacgattgaacccatggatgaggagggtgcttctaaccgtaatcagcgcttaaaacgtttggcattttatgagcgaaatggctatcagttattgaatcacttctattttgaaggaagtgaacgctatcaaattttgacaacggataggagcctttgtttagctgatttggagcaggatctagctaagaccttcttaggaaagtatgttataagggttgagtaggggaatcattacttggttaaaggtcaatgagcagaataagaataatcaaaataactttttctcttgtcattagagggaaaaaatgatagaattgtaacgttgactaaatgcacgtcctgtgcaaccgcacgactactgtttccaagtgggttcgtccccgcagtactaggcgagtcttcacagagggaaacctcagacacattaaaaattttaataggaggtgcatcatgagcacatacgcaatcatcaaaactggtggaaaacaagttaaagttgaagtaggtcaagcaatctacgttgaaaaaatcaacgctgaagcaggatcagaagtaacttttaacgaagttgttcttgtcggtggtgataaaactgtagtaggtactccagttgttgagggagctactgttgtcggaactatcgaaaaacaaggtaaacaaaagaaagttgttactttcaaatacaaacctaaaaaaggtagccaccgtaaacaaggtcaccgtcaaccttatacaaaagttgttatcaacgctatcaacgcgtaagttagcgactaatcactaagaaaggacacaatcttatgttgaaaactcttgaaaacttgcaacttttcgcccacaaaaaaggtgggggttctacttccaatggtcgtgattcacaagctaaacgtcttggtgctaaagcagctgatggacaaactgtatcaggtggatcaatcctttaccgtcaacgcggtacacacatctacccaggtgtaaacgtaggccgtggtggtgacgatacactcttcgctaaagttgaaggtgttgtacgtttcgaacgtaaaggtcgcgacaaaaaacaagtatctgtatacccagttgctaaataattaagctaaagtctgcacttttgtgtaggcttttctttatgaaaaaggagaattctatgcccttaaatcactaccaacaagaagtgggaccaagtctagcggatgctagtccaggtaagatgccagatgttgctctattagaaggtcattattgtagcgttgaacatttgacggtgacagagcattatgaggacattttagacttttactttactaatcagattctttctgattggacctatatgtatgcggatccttttgagtctgaagaagctgtacgtcagtgtttggaggattatgaacaatcccaaaatccttatttctttgccatcagggataaggcttcaggtaagattctaggaaccttttcacttatggctattacacccaaaaatcgtagtgttgagatgggacgagtgattttggcacctgctttacaaaagactagagcagccacagaagctcaatacctgcttatgaaatatgtctttgaaaatcttaactatcgtcgttatgagtggaaatgtgatagtcttaaccgtccttctgccaatgctgccatgcgtttagggttcacctatgaggggcgttttcgtaatcatgctatctataaggggcgtagccgtgatacggactggttctcgattattgatagtgagtggccagcacttaagaaacgatttgagaattggctagctcctgagaattttgatgaaaaggggcagcagaaacgttctttgagggattgttagctggcaatataagggctctcttctgatgaaggagccttattttagtagtcctagtcctaaatcaaagctcctacttttctagtgattattgttgctgtcaaaatcagtctaaatactcatttttctgtcaataatattcccataataaagcatatttatgctataataaagagtaattgtatcaaggagaatatgactaatggatttaattcgcgaaaaagtatttgttaaccgttaccactatgatgttcgtaaccatgagtgggaaaaagagaatggtgttcctaaaacaaatgttgaagtaactttccagttgcacaataaagatgaagaagctaacaatacgtctgttgtagctgttttgcaatttatgattgtccgtgatgagtttgttatctcagggattgtttctcaaatggaccacattcaaaaccgtatcgtcaatgaaccaaaagacttctcacaagaagaagcagaagccttggctgcaccgctcttggatacgcttcaacgtttgacttatgaagtaactgaaattgccttggatcgtccaggtatcaatttggagttctaagatgtctcttgcagttattacggattcatcggttaatctccctgctgaaattcagggccatgctgatgtttatgttttagatattccggtcatcattgaggggcagccttttgttgaaggaaaaaacttggatgtcaatcagttttatgctcaaatggcaaactctgaggaactgctcaagacgtcgcaacctaatctagctgacttggataacttgcttatggagtttgaggagaaaggttatacccatgtcgttgggcttttcctttcttcaggaatctctggtttttgggccaatagtcagtttttgattgaggaccatgccaagttgaagattgcttttcctgatacaaaaatcacagcagctcctatgggaaccatggtgagaaacgttttgcattggtcagctcaagggatgtcttttgagaacattttgaagaagcttgaggagcaggttgaccaaacgacggcttatattcttgtggatgatcttaatcatctggtaaaaggtggtcgtttgtcgaatggttcggcgattttaggaaatcttttgtctatcaaacctattttgaattttaatgacgaaggaaaaatcgttgtttttgaaaaggtgcgtacagagaagaaagctgtgaaacgtttggttgctctagctgaggaaaatcgtgaaatggaacttagtatccttcacacgaatgctcctgaaaaagctgaagattttaaaaagcagctagaagcacagggaattagcgtttcaacagtggtatccttatgtgctgtaattgcgacacacttgggtgaaggagcgctagtacttggtctaacacctaagtttaccaaataagtactatccatctgggatggggtttgtctatgattaagatcaatagagaggaaaaatgacatgtctattaaagttattgttgctggatttaaaggaagaatgggttcaactgcggttgaaatggtcaagggagatgacgaattgactttggctgccttgcttgacccatttgcgacagaaaaagaagtggacggtgttcctgtcttcacagataaagcggatttggttggctttgatgcggatgtctgggtggatttcactatgccagccgttgcctatgaaaatactcgttttgctttggagaatggttttgcaccagttgtgggtaccacaggatttactgaagcacaaattcaggaattgacagacctttctaaagacaaatctattggtggtttgattgcacctaactttgctattggtgctatccttcttatgaagtttgcggcagaagctagcaaatatttcccagatcttgaaatcattgagcttcaccatgacaagaaaaaagatgcgccttcaggtacagcagtgaaaacagctgaacttattcgtgaggttcgcgaaacgaaacatcaaggtgctgaggatgaggtggaaacacttgctggagcacgtggtgctgagtttgatggtttccgtattcacagtgtacgtttgccaggacttgtggctcaccaagaggttatctttggtgcccaaggagaaggctttaccttgcgtcatgattcttatgaccgtatttcctttatgggtggggttaaccttggtattaaagaagtggttaaacgtgatcagcttgtttatggtttggaacatttactatgagattaagttatttgccttctgagtttcagaaggctttaccaatattagagaagattaaggctgcgggttttgaggcttactttgttggtggttcggtacgagatgcccttcttaaccgtcccattcatgatgtagacattgcttcatcttcatatcctgaagagaccaaacagattttcgagcgtacggtggatatcggtattgagcatgggaccgttttggtcttggaaaatggcggagagtatgaggtgacgaccttccgaacagaggatgtctatgtagattaccgtcgtccgtctagcgtgtcctttgtgcgttcattggaagaggatcttaagcgtcgtgattttacagtcaatgcttttgctcttaatgaaaatgctgaggttatcgacaagttcaatggtctagctgatttggacaatcgtgttttgagggctgttggtaaggctgaggaacgctttaacgaggatgctcttcgtatcatgcgagggctacgttttgcagcgagtttagactttgatatcgaagaaaaaacttttcaggctatgaccagccatgccccacttctggaaaagatttcgattgagcgaagtttcatcgagttcgataagttgcttttggccccacattggaaaaagggaatcaaggcacttctagcgactaaggcttatcagtaccttccggattttcaagaaactgctgaagaatggcagtcttttgtggcagactatgtggaggactttagatttacaagttctgaacaggcttgggcggcaactcttttggctctcaagcatgataatccacgctctttccttaaaaaatggaagacgtctgttaatttccaaaagacagttcagtccttgattgagattttcaatttccgtttggagagagccgtgactaaacaagatgtttatcagtatggtaaggagctcttagaggcggctgagactttgagacaggctcagggcttggatgtcgattatgtgcgtattgccgatttggatggtcagttgctcatccatgataagcacgaaatcgttgtgaatggtggcacgctgatgaaggagctaggattcaaacctggtccggaccttggtcgtgcacttaaagccattgaaaatgccatcgttgatgggaaactagctaatgacaaggaagctattatggcctttgttcaagctatgaaataagtttacggacgttataaaaatgacacaccgctacagagcatgcgtaggatccgtagcggtgttatttgtaagaaggaagtaagatgtcagattttattgttgaaaaattaaccaagtccgttggagacaagacggtttttaaagagatttcatttattatccatgatttggatcgtattgggattattggtgtcaatgggacaggtaagacaaccttgctagatgttgtctctgagcgtattggttttgatggtgatgtgtcacctttcactaaggctaatggctataagattgcttatttgactcaggagccagaatttgatgacagcaagacagtgcttgatacagtcttgtcatcagaccttcgtgagatggctttgattcgtgaatatgaaacccttatggcagattattctgaggagaatcaggctcgcttggagaaggttatggctgagatggatagtctagatgcttggtccattgagagcgaggttaagacagtcttgtctaagttgggattgtcagatctctcgcaaaaggtcggggacctctcaggtggtcttcgtcgtcgtgtgcagttggctcaggttctcttgaatgatgcagatctcctgctcttggatgagccaaccaaccatttggatattgatactattgcttggttgacgaattttctcaagtcttctaaaaagacggtactctttattacccacgaccgttatttcttggacaatgtagccacacgtatctttgagttagaccaggctaatttgattgaatatcaagggaattatcaagactatgtgcgtctaaaggccgaacaagatgaacgagatgcagcagcccttcacaagaaaaagcaactctataagcaggagttggcatggatgcgaacgcaaccgcaggcacgtgcaaccaaacaacaagctcgtatcaatcgctttaaggatcttaagggtgaggttcaccaaacggtcaataatgaggatcttgaaattaactttgagaccagccgtattggtaagaaggtagtgaacttcgagcatgtcgatttcgcttatgaagatggcaagcaaattctcagtgatttcaatcttatcatgcaaaatcgtgatcgtatcggtattgttggggataatggtgtcggaaaatcgaccttgctcaatctgattaatggtgaccttgtgcctacagctggtgtcctagatattggtgagacggtacgtattggttatttctcacagcaaattaaagatatggatgagagcaagcgtgtcattaactacttgcaagaagttgcagatgaagttaagacaacggttggaacaaccagtatcacagagctcttggagcaattccttttccctcgttctacccatgggacacagattgccaagctctctggtggggaaaagaaacgtctttatctacttaagattctgattgaaaagcctaacgttctgctcttggatgagccgacaaatgatttggacattgcaactttgacggttttggaaaacttccttaatggttttggcggccctgtcgttaccgtaagtcacgaccgctatttcttggacaaggtagctaacaagattctagcctttgaagagggtggcgtgcgagagttctttggtaactacactgactatcttgatgaaaaagccttcttacaagagcaatcagccctcctcgagaaggaaaaagagcaagctagcgttaaagttgagaaagtcaaagaagacaaaaaacgcatgagctactttgaaaaacaagagtgggcgaccatcgaggatgagattgctgaccttgaagccaaaatcgaagagattgaagcagccatgcttgaaaatgctagcgattatggacagttagctacccttcaacgtgatttggatgctgctaatgaaaccctacttgaaaagtatgaacgctatgagtatttgagtgagctagagggataagctctttagtaatcaaagtatgacaaaagccctgcatttgcaaggcttttttatgtttatgtagtgtctggtttcttcttaccacaagcggaatgaaaaggaaaggactgaaacacccgtaaagataattaaggaagctaccaagcgcccaataagaaaggctgagaaaaacggagcactaaagagcaagagcccaaataccagacaaattaaggcgattgacagggcgggttgtcctgagaagccgaattgacgttggcgatgagcttgaaagccttgtgtaaaggctgagacaagaagccaccaagcaataatggttacagctacacctgagagcacccatgctgatgttgatagcaaaataatcccaaaaacaatggaaatgatactctgaagcagttggaagaaggagcggttttcgttatctcgtttaaaataaaccatgagacttgaaacaccagatatgagcatcactagggcaaacagccaaccaacgatggcaagaaggtttgtaggattagcgaagaaaaagacacccaagagtgtaatgagaatgccactaatcaatgtaaaacttttcataggctacctcttattaatttttcttaatactactaaataagtatcaaattgtcaaacaaagacctactttagagtggcttgatgttataagtgtaggtggcagcttttctggttctcgtagctacctgacgacctgttttttggaagaggtgtttaaagcggcgcaagaaatttgtggaatccatcttgaggtagtcttcattaaaggtaccaaaaagttgacggtaggtagtcaaggtgttttcctcgggcataatggaaaggatagttggatagtattcgagtcgtcccttgatacgtttcatagctgttaagaggatttcccagtggtcaaaggcgaggtcatcatgtgacagtgtcttttcaccatcagcaagttgcagtcgaccgtctaccatggcgatgtctaaccaatgcgtagacgcggcatcgtcggcagccttttccacttgaatgtcattaaaggtcataaaacagagataagccactgtaatggtccacattcgaggatcccgataaggtgttcccactgtaatgagttgctcaatgtggtcaggattgagtttaacggatgtttcttcctgtacttcgcgacatacagctagattgagatcttcttgctcctgaacgaagccaccactgagggcgtatttccccatgaagggatggttttttcgcttgataagtaaggtttggactcttccttcataatagcggaagatgacagagtcaacggtcactgagggcttaacgtacttatccacttcctctcgcctatagatgtccaaaaattccttttcactaccagagttttcgaaggttttagtcataggtttcctcctttatttattgtaagtgcaaatgatgattgctttacaccagtcttctaaatctcgatgtgtagacgttccttgattgcttttttggcattgtggtagttgtccgcaaagaagctgtcgctattactattttcccctaaaataacgattttatccttgaatggtgataggaggtctaggaggtgctgggtaaaccagtcacgtgtttgattatcagccatagtcatgtcacggaaaccatcatctacatagtttgattttggcagaatcacaaaaatcaaatcccacttttcacgggcttgagttacctgatagagacgatccaacatgtcgaactcttcttgggagatattttctttcaaatagtaatcgatataaaccttggtgactgttgagttggtgtcggcaaaaataagacccgaatgctgtcctttgtcaatgatatcagaggtttgggcatattgatctgttaggaggtgaatatagtcgttggtatctagttcatcatcacgaacattgtatttttcttgatattctctagcatattccagagagcaaggggcgttgtaggtgcgggccaaatccttaacaagagtagtttttccaccgctagcagagccaacaacaaggaccttgcgcgtaaagtggcgacggaaaggcttggtgataaaacgccaattttccatcggattgtctcgaatctcagtagcagagatattgataatagaccgttcgatgagttctacctgagcttgagggtaatagcgattgagctcagttacatactctggctctccaacatagaaggtaatcttttcaggatcatccgtattcttagcgataagctctttgacacgattaacccaaggcacccagccctctggataggctggcatcccagcttcgtctagtttatccacaacgactaattcatcatcatagaagacttctcgaacataacggaaacgtcgattgagtgataggcctgcgcgtgtcccacgatcttcttgtgtgttgctgccacttacgatgacgagcacattgtcattagcacgttttgccttggtaatgaggtcaacgtgtccgacgtgcattggagcgaaagttccaaaaacaatgccgatgcgctttcctgataattgttttcttttcataaaaaatgatcctttttcaagatttagtaaaattactaaatttatgatagcatagttggtaatctttgtaaatgtaaaaatagtaaattcactaaattattttcaacacattttagccttaaagttcaaaaaaagtttaaaaaattttggagaaaaaccagaaaaatagaatccgcttacattattgaattgatagctttttagaattaactaaaaaagtagaattcacttgctatgtcacaaaacctaacataaaaatcaaaaaaatagcagaaaatacttgacaagaagattctgaaaatttatactattcatgtaattaaattactaaggtaattatttgaaaggaaacattgatatgacaacaggtaaagagtacgttgctagcgtttttgaaaaagtgaaagctcaaaatggccatgaggctgagttccttcaagcagttgaagaagttttcgattcacttgttcctgtcttcgataaatatcctaaatatattgaagaaaaccttttggaacgtttggttgaaccagaacgtatcgtttcattccgtgtgccatgggttgacgataaaggacaagtacaagtaaaccgtggtttccgtgtacaattctcatcagctattggtccttacaaaggtggtcttcgtttccacccatcagtaaaccaatcaatcatcaaattccttggtttcgaacaaatctttaaaaactcattgactggtcaaccaatcggtggtggtaaaggtggatcaaacttcgatcctaaaggtaaatcagataacgaaatcatgcgtttctgccaaagcttcatgactgaattgagtaaacacattggtgcagatacagacgtacctgcaggtgatatcggtgttggtggacgtgaaattggttacctctacggccaatacaaacgtcttcgtaacgagtacacaggtgttcttactggtaaaggtttgaactggggtggatcacttgctcgtacagaagcaactggttacggtgctgtttactttgcagaacaaatgcttaatgcacgtggtgaaaactttaacggtaaaactgcagttgtttcaggtgctggtaacgttgccatctacgctattgaaaaattgcaaagccttggtgctaaagcagtaacatgttctgactcatctggttttgtttatgatccagacggaatcgacgttgacttgttgaaagaaatcaaagaagttaaacgtgaacgtatcgttaaatatgcagaagctcgtccaaatgcaaccttcacacctgctggtggtgaaaagacagtttggtcagttaaagctgacttggcattcccatgtgcaactcaaaatgaattggatgaaacagatgcagaaacacttgtagcaaatggtgtattggctgtttcagaaggtgctaacatgccttcaactttgggagctattgatgtcttccttaaagctggtgtatcatttggtcctgccaaagctgctaacgccggtggtgttgctgtatcagctcttgaaatggcacaaaacagcggacgtacacaatggacattcgaagaagttgatgctaaactctacgatatcatgaaaggtatctatgaaaatgctgcagcagctgctaaagaatttggtcatgaaggtaaccttgttgtgggtgccaacatcgctggattccttaaagttgcagatgctatgtcagcacaaggtatcgtttaattaatagactattaccaatagcctctcgataaaataagaaaagaagcctgcgggtttctttttttgtttagacagacttaggaggaagaggagatttgtccttttttggtataatgagctagtaagaaatctttttctagagtagatttttatgaattagaatatgagaggaataatcgtgagtcttggaaaggatccctgtggggcaaaagaaaagaagtatactaatcagacagtcattctaataagtttcttgatcagcatagtgtcaatactgcctatgttcttttttagggacaagctttatggtgatgatattgtctttcacattaaccgactgttatccttggatactgtctggaagagtcctatcaattttacaactaacggagggaccggacaattaatcaataccttttatccctggttaacctattatcctatttttataatctataagctgactcagtcagtctttgtagcctggatgagttttcaatttcttgttcgctttgtaacttgtttgcttagtttttacggattacgtttattgaactattctgataaacaggtgatggtatttgctaccttttatctcttttcgggttatttcttgcacaattcttattaccgggcagccgttggcgaaacgctggctatgatttttttacctctagttttcgttggcgttcgtttgataacatttggagattacaagaaatggtgggttttgactcttggcatgcttggtttagtctattcccatgtcttgtctgtccttttggcttctcttatgattttcatagcagtggtagctagttttgggatttgggataataaaaaagaacgtattctaggatttcttaaggccactcttgtcactcttagtatgtctctagctttctttgttcctatgatagagcaattcaagtatgtcaccctacgaacgacttttaaaccgctcctatccaagactgccttaagtttggcagacaactgggagttgattctaaaaagtgatttaaggactccatcagttaatcttctctatctcttgggtctagtgctaagcctaatctttgctaagcgttttgtgaaggataaggaagctagaatttacctttttatttcttttgttttggcttttttaactttgaatagttttccttggcagttattacaggagagtccagtgtccaaccttcaatttccttggagattatggagttttgccttgcttttcttcagcttagccttggctaatgtcttagaaaatatttctatgaaggcagcgatgttgtttgtcttgttgggtctttgtctgaatatgtttcagattgttactgtccaagataagatgactaaagccaagaatatattgccaagcaatacaaaagtcacgagagaaatgctagctaagggaacttataaaaatataaatggcgattacaccaataaagaagtgccctttggctttgtctttgacaaacatcttttcttggataatcaggaaattaagtcaaccatcaaccgttctccaaatgagctagcacttacagtaaacaacgagtcaaaagaagctaaggtcttgtcgctaccagttttctactacaaaggacaagaagcgagaattgatgggaagcgagtaactacttacttagctaaggaaaagaatccaacttatctagtcctaccatcaggtaagcatggtgtcgttttgacctatagctataccccagttgccaaattggcaatgggtgtttcaactattagtcttttggcgtttattggttatttgtatagagtgaagaaagatgactaaaaagaagcctgcgggtttctttttttgtctgttttactagagggtaggccttttgatataataggtcaagatcattaatatgaaattgaaaacctttggtttcgataaaagaagggtatatgatttcatagtttagataagaaaagggagtaaatagatgataaaaactatcgtaaaggatgtctttttccttggacaaaaatcgacagaagcgactaaagaagacctctatttggctaaagatttacgtgatacactggagtttcataaggatgcctgtgtgggtatggctgccaatatgattggcgttaaaaagcgtgttattatcgtcaatatcggttttgttaatctagttatgtttaatcctattttagtcagcaagtcctcaccttttcaaacagaggagtcttgtttgtcattagagggaagtcgtccaacaaaacgttatgagtcgattgaggttgcttatttagatgaacaatggatgcctaaacagttaagtttttctggcatgccagcccaaattattcaacatgaattggatcatttggaggggattattatttagatagcctagcccaagtgggctaggtttttgagttcaaatccttaataatcatagttatgggagtgagagtggaaagcaatttttttctcactcttttttagttctcataagaacttttttcttgacattagttctcataagaactaaaatagtttccatgagaattattcaaggagggacttgcgatgcatggaaaagatacttttagtgaattcagagaattcatcaatactatggaatctcgcgtgcaagagttaggaaaggtccatggggttgagcatttagctggccctcaaggatttgctgtcaagtatttgtctgacaatcaagataaagaaatctttatcaaagacattgaaaaaagactatctatttccaagtcagtggctagtaatttggtcaaacgaatggaaaaaaatggttttgttgagttggtgacatcggacaaggataaacgctacaagtatgttcatctgacagacttaggtaaaaagaaagctcgagatgtcaaacattttcgagaggccatccatgaacagctgttagaaggtatttccaaagaagatgctgaaacagcctttcgtgtctttcaccaaattcgtatgaatttagaaaaaaataaggagtaacttatgtttaaaatttttaaacgtttgacgacaaaagagttaatcatgattgtcttagcggtgatttttgtttgcttgaacgtctatctaaacttgaaaattccagactatatgtctgatattacgacactcttatcaactaagggaactaaagcgtcggatatttttgcctggaatacagatgccccagggatgcgaatgcttttaatgtcatttgcaggctttatggcctctgtagttgttggtttcttagctgccagaacagcggcaagttttaccacccgccttcgtgatgatatcttccatcaggttctagatttttcggatgcagagatcaagaaattctccattcctagtcttttgacccgtacgacaaatgatattacccaattgcagatggtacttaccatggggttacaggttattacacaggggcctatcatggccatttgggcgattacaaagattgccgataaaaatggaaattggctccttgccttgcttgtcgctgtggcagtgattgccattctcatgcttttcctcttgattatggttatgcctaagcaacgcttgattcaaacgctgaccgataaactgaatagcgtaacgcgtgaatctcttacaggaattcgtgtggtgcgtgcctataacgccgaaagttatcaagaggataaatttgaaaaggccaatactgatttgacccaaaacaatctctttatcggtcgttcttttgccttactgacaccggtgatgactgctgtatcaagtggtttgacactggctatttattggattggtgcacatttgattgaagatgttaagattccaacagatccaactaagattgctggtgccatggaaaataaggtccatctcttctcagacatggtggtttattcatcttatgccatgcaggttgttatgggattcatgatgatgattgttgttttcttccttcttccacgtgcagttgtagcagctagtcgtatcaatgaagttctagatacccaatcttcagtctcttatcctgaaaatagttctgaaaagcctaaagaagtgggtactgtcgaatttgatgatgtttccttccgttattctgaaacttcagagcctgttttggagcatgttagcttcaaagctaaaaaaggtgacacggttgcctttattggttcgactggatctggtaaatcaacgcttgtcaaccttatcccacgtttttatgatgccacgcaaggaacgatcaaggttgacggtgtcgatgtgcgacattatgaccatgaaaccttgcacaatatagtcggttatattccacagaaggctgtgcttttctcaggtgatatcacgtcaaatatgacgatgggaacgagcaataacagtccccttgatgatgctaagatttgggaagctctcgaattggctcaaggaaaagactttgttgaaaataaagaaggtcaacttaaagcagaagttgcccaagctgggtctaacttctcaggtggacagaagcaacgtttggctattgcgcgtgccttggcacgtaagcctgaaatcttgattttcgatgattccttctcagccttggattataagaccgatcgtaagttacgtcaagaattggctgaaaaaacacaagatatgaccaagttgattgttgcccaacgtatctctactattatggatgcggaccaaatcttggtacttgaccaaggtaaggtcgttggtcaaggaactcacaaggaactcttggcaaataatgaggtttaccaagaaattgcctattcacaattgtctaaggaggagttagaaaatggaaaataagccagaaacatcatcctataaacgcttaaaaccctatattaaaggtttccaaattccgtttgtccttgcgatttttggagcaattatttcagcggtcattacagttattggaccagataagcttaaagaaattaccaatactattactgaaggtatcacacctacaaaaatggggacgattccaggtattgatttggacaaggtagcaagtattgctatgaccttggctgttctctatgccatttcagccattgtgggttacttacaaagctttaccgttgcgacggttacacaacgcttttcacaacgtttccgtacagctatccaaaagaaaatcaacagtgttcctcttaattattttgatagtcactctcaaggggataccctctctcgtgtgaccaatgacgttgaccttttgggacaatcgcttagtcaaggtttaggtaccttgattacttcaagtgttctcttggtagcagccattattatgatgttttactcaaatgtcactatggctttcactgcgattggttctgtcttgataggttttgttctggtagcctttatcatgggcttctcacaaccccttttcaaacgccaacaagaaaatttggctaatattaatggttatattgaagaaatctacacgggtcaagcagtcgtaacgagttacaatgctgctcaagaaagtagtcaagctttcaagggacttaatgataaactctataaatcgatgtggcaatcacagtttatctcaggtattatgatgccacttatgattttcattgggaactttggttatgtcatggtctgtcttgtgggtgccatcaaagttattgatggtagcttgactattggtgatgtggtagccttcatgacttatgttcgtatcttctcccaacctctttctcaaattgcacaagggattacacaactccaatcagccactgcagccattggtcgtatctttgaatttttggaagaaaaagatatggacgacgagtcagctaagacagctgagttgacagatactaaaggtcaagtagtctttgaccatatttcctttggttatactcctgaaaagactattattcatgacttttcagctcttgctaagccaggtcaaaagattgcgatcgttggtccaacgggtgctggtaagacgactattgttaacctgcttatgaagttctataacatcgaccaaggtcgtatcaccattgatggtgtggatacgaacgacatgaaacgtgaaactgttcatgatcaattctctatggtgcttcaagacacttggctctttgaaggtactattcgtgataatttgatttacaaccaagagaatatttctgatgagcaagttattgctgcagccaaggctgtcggtgttcaccacttcatcaccacacttccaaagggttatgatacttatttggatgattctgtgaccttgtcagttggtcagaaacagctcttgaccattgcgcgtgcgcttcttaaggatgcccctctccttatcttggatgaggcgacatcatctgtcgacactcgaacagaagaattgattcaaaaagccatggacaagcttatggaaggccgtacttcctttgttattgcccaccgcttatcaaccattcgaaatgctgaccttatccttgtgatgaaagatggtaacattattgaacagggcaatcatgatgagctcatggcagcagatggtttctatgctgatctttataatagtcaatttacagaagaagttgcctaaacttttcttataaaattataagattttacaaaaggccatagaacgtatgactgtcagtcatgcgttttgtgttatactgaaaaaaacagacagattaggagattatgatgcaatatcgcaaagcaagactagacgaagttcaggaagttgcacaagtatgtgccgatgcctttgaagattacccctatctttcaatgattgccagtaatttaaagaagcctgaacagtatcaggaatttgtcttagccttgcaggaaatattggtgcgtttggcgattaaacgggactcatgtttggtggctgaaaaggacggtcgcattgttgcggcagctattttacagcatcagacgatttctatgcttaattatcttcaaaatggggcgactaagcttttccgttttataagtatcaccaagttgttcaagtattttaactttgttgaagagtccgaaagacatctggaagattctgcagaatacgactggtacttgatgatgttggcggtgactccagattatcaaagaaaagggatagggagtcgtttcttgcttgaaggggttgaaccttttgtgcgtagtacaggaggtcacagtcttggtttgattaccaatcgcgattacaatgtacctttctatgagaaaaatggctacaagcaatgtggttataaagctttgacttatgaaacacacaaactaggtaactggccttttgtcaaatcgcttgatgaatagccttgtgctatttaattaagataagcaaaatgaatctggcttcggctggatttttttcttagccttagagtccttcttgtctggctcattccttatttttaagcctaactatgctataattaggaaacgctattagaggaggtttatatgtcaactccaagtatttatggggaatatgctcagtatctccccaagattttacaagaaataacagacccgattattgcggctaatattactagcaaaaaggaaacaggctttaaactctatgaacattttatttcacgaatcaaagaaagcgattctatgcgtgaaaagtgtcgtaggaaaaatttacctgaaaccaaccaatctgctctcaaggaaattcgtgacagtattgggattcgaattgtttgtggctttgtcgatgatatttacaaaactatcgatgtcatcaaggctatccctggcgtttctatctataacgagaaagattacattttaaatgctaagcccaatggctatcgttcttaccatctcattttagaagtagaaaccgagtttccagatgtgctaggaaatgagagaggaacctattttgttgaggttcagcttcggaccattgctcaggattcctgggccagtttggagcatcaaatgaagtacaagcacgacatcaagaatccagaaatgattacccgtgagcttaagcgctgtgcggatgaattagcttcatgcgatttgaccatgcagaccatccgtaacttaattcaagaaggaggggactagaatggctttgaagattctactagctgaggatgaagaggctctttctcgagtttacaaggcagccctagagcatcagggttatgaggtggatcaagcattcaatgggcaagaggcagtagacctagctgcacagaatgcctatcaagtgatgattatggatattatgatgcccattaaaacaggtattgaggccctaaaagagattcgctcctctggggacaggacgcatgtcattatgttgacagctatggctgaaattgatgatcgcgtgaccgggcttgatgctggggcagacgattacttgaccaagccaatctcccttaaagaacttttggctcgtctgcgttcattagaacgtcgtgtgagtgagagcttcactgccaaaattttgactcttggttctgttcgtttggaccaagaagagcaggagttggtagctgggaacgccattcgactttcaagcagagagaccaagttactggcccacttcatgctcaatcctgccaagaaattaacgactgagcaccttttcaagactatctgggaggatgaggaagatgtggacgagtctattgtctgggtctatatttcctatctgcgtcagaaattgcaagccatccaggctgacatcagcattcttggtgaaaaaggaggcgacttttgccttctcgccaattagagaggagtagctcatgtttagacgtttacgacttcaatttattacgattgcttccttggctatcctctttatcttggtctctactgtgggaatcatcaatactgtgaggtcctttcagacggagcaggaaattagtaaggttctcaacacacttacagaaaataatggtagtttcggaaaaacgaaaaaaattgagaccaatcaagggcgtgaaattccatcagatagttttcgttttttcagcgtgaccttgtctggtgatgaagtggtcagtcaggacaccagtcatacttccttgataaatgatgaagaggccgctacttatgcccgagcagctagccgaatgacgagtactcttggaaccattagagaaaaaaatattaatctcagttatcaggttagtaaagttagcaaaaataagatccttgtggtctttctggacacgacctcttattataattcttcccaagccttgttaaatctttctatccttttatcaatgtttggctttatcttttttgttgtcattgttagtgccttatcaggaattgtcattcgtcccttcattcgaaactacgaaaagcagcgacgttttattaccaatgcaggtcatgaattaaagacaccattggctattatttctgccaatacggagctacaagaactcatgactggagagaacgaatggaccaagtcgacgaacgaccaggtggcacgtttgaccactctaatcaattctcttgtagccctatctcgtctggaggagcagccggatattgttcttcaagatgtagatttttcctatattactgaggatgcagcagaggactttaaggggcctgttgtccgagatggtaaatctttcgttatggacatcacaccggatattcatgtaaaggcagaagagaagtctctctttgaacttgtaaccctccttgtggataatgctaacaagtattgtgatccagaagggatagttactgtaaggctccgtcagattggaaggacacgaaaacgggctcgtttagaagtatcgaacacctataaagatggtaaggatgttgactatagtaaattttttgaacgtttttatcgtattgaagaatcccataataacagagaacacaaggggtttggtattggcctctccatggctcaaagcatggtcaaattatttaaaggtcgaatctttgcctcttataaaaatgacaccatcacctttacggtcatcttgtaaggatattttttaaatatttgactaggtgaaaaccctaatttatgataaaatagtaaggatgaagatttagtgttttttttgcaaaaaagaaaccattttcctatcctaatcataaaaaggagatgctcgaatgagaccccttaaccaccttaaaaggctggtaatggacgacttaggaaagataaatctcagctaagaatcaaatcataaaacaaaatagttaatagggagaaatcatggcagaaccaaaatacaaacgtgtcctcattaagctttcaggtgaagctctagctggtgaacgaggtgttgggattgatcttccaactgtccaagctatggctaaagaaattgctgaagtagcggattcaggtattcaaattgctctagttatcggtggtggtaacctttggcgtggtgaacctgcagctgaagcaggaatggatcgtgttcaagcggactatactggaatgcttggaacaacgatgaacgcccttgttatggctgatagtctgaaacaactcggtgttgatacacgtgttcaaacagcgattgatatgaagtctgtagcggagccttatatccgtggtcgtgcccttcgtcaccttgaaaaaggccgtatcgttatctttgcagcaggtattggttcaccatacttctcaacagatacaacagcggctcttcgtgcagctgaaatcgaagctgatgctattcttatggctaaaaacggtgttgatggtgtctacaatgacgaccctcgtaaaaacgctgatgccgttaagtttgacgaattgacacacgtggaagttattaaacgtggtttgaaaattatggatgccacagcttctaccctttcaatggataatgacattgaccttgttgtcttcaatatgaacgagccaggaaacatcaaacgtgttatctttggtgaacaaattggaacaactgtatctaacaaagcagaatcacacaaataagaaagagagaatttatgacaaacgcaattattgaaaaagcaaaagaacgttttgcccactcacacgagtcattggcccgtgaattcggatctatccgtgcaggtcgtgccaatgcatcacttcttgaccgcatcactgtagaatactatggtgccccaacaccacttaaccaattggcttcaatcactgttcctgaagcacgtgtccttttgatttcaccatttgataaaggctcaatcgctgatattgaacgtgcaatcaacgaatctgaccttggtattaacccagctaacgatggttctgttgtgcgcttagttatcccagcacttacagaagaaacacgtaaagagttggctaaagaagtgaaaaaagtcggtgaaaatgctaaaatcgctatccgtaacatccgccgtgatgctatggatgaagctaagaagcaagaaaaagacaaagaaatcacagaagatcaattgaaatctttggaaaaagatatccaaaaagcaactgatgacgctgttaagaagattgacagcatgacagcagaaaaggaaaaagaactccttactgtttaatcaatagaaaaataaggagagtgggacagaagcaaaagagcatggactatgttagcttccttgtccgactctctttttagaggaaaaagatgaatacattacttggaacaattattactgccctagtaacagatgaaaatgacaaattttattttgttcaaaaggacggtgtgacctttgccttgtctaaagaagaaggggaacacgccattggtgacatggtgacaggtttcgcctatacagatagcaagcaaaaatcacgtttgactcaaaaggagatcaaagcaactcgtgattcttatgattggggagaggtcaccgaagtccgtaaggatttgggtgtctttgtagatgtgggaattccagataaggagattgttgtctctcttgatgttttgcccgaactcaaagagctttggcctaagaaaggcgacaagctttatatcaaactcgatgttgataaaaaagaccgtatttgggggcttcctgctgaacctgaggtctttcaacgtatggctggtcctgcttacgataatatgcaaaaccaaaaatggccagccattgcctaccgtctcaaactgtcaggaacttttgtttatctaccagagaataacatgcttggtttcatccatccatcagaacgttatgcagagccacgattaggtcaggtccttgaggcgcgtgtgattgggttcagagaagttgaccgtaccctcaatctttctcttaaaccacgttcttttgaaatgcttgaaaatgatgctcagatgattttgacttatttagagagcaatggtggctttatgacgcttaatgacaagtcatcaccagcagatattaaggaaaccttcggtatttctaagggacaatttaagaaagccctaggtggtctgatgaaggctaaaaaagtcaaacaagaccagtttggaacagaattaatcggttaggagaaggcatgagaaaatccttttatacttggctgatggcccagcgtaatccaaagtccaatgaaccagtagcaatcttggctgacttggcttttgaagattcaaccttcccgaagcattctgatgacttcgaagaagttagtcgttacttggaagatcaagctagcttttcctttaatctggggcagtttgaccagatttgggaagattatctggctcattaatagcgactaagtctacgataagcataatgacttttagcattttctttaaaaagtaattaccatttgaattggtatgaattgttacaattttttacaaatatctcagctgtttttcaataaattaggcttgttacaactagttagtaattgctttaaagtgcagtaaatcaccccttttttgacaaaaagtgtggtattattgtagatgttaaaattgttaaaaaaggaatgaattatacatgttatcaaaatctaaaacaacaaaggcacttctttactcgaccgcagcactttcactttttgctgcaagtcacgtacatgccgatgaaacttcaaactgggcagctcgttcagtagatcaaatcaaagcagatattgctgtaagtgataaccaacaaacttatacagttcaatacggtgatactttgggaagtatcgctgaagcaatgggtatcgatgtgaacgttttggctaacatcaatcaaatcacaaacattgatttgatttaccctggaacagtcttgacagcaacttataatgctgataatcaagctgtctctgttaaatttgaaactccagcttcagaaacatcaactacacctgtagttgcagaagctaatttgacaactaacgaagtgactgtaaatggtcaatctgtagttgcagcggacttgacagctccagttgaaacagtaagcacaacagctactcaagcacctgttacagaagagtcaactcaagctgtttcagaagtaacagaagctatcgcatcagcatcagaagcaccagcatacgcagaaactgaacaaccagttgctgatgctattgatcatgtcactgcgtcagcagaggctacacctgaagcagaaactactccagctgctgaaacaccagcacaacctgaagtaaaagaagaagctccagcggcagaaccagcagcaacatcagaagcgtcttcagaagcaccagcgacttcagaagcgccagcagaagctccagcggcagaaccagcagcaacatcagaagcgtcttcagaggcaccagctgcttcagaagcgccagcagaacagccagcggtagaaccagcagcaacatcagaagtggcatcagaagcaccagtagcttcagaggcaccagcagaagcgtcttcagaggcgccagctgcttcagaagcgccagcagaacagccagcggtagaaccagcagcaacatcagaagtggcatcagaagcaccagtagcttcagaggcaccagcagcacaacctgcatcaacaaatacacttccaacggatccacaccttcaaccacaagctgaagctttccgtcaagatgtagcggcacaatttggtcttactgatatcggtggttaccgtgaaggtgatccacaagaccatggtaaaggacttgctgttgacgttatggtaccagttggttcagcagttggtgatcaagttgcccaatatgcagtagacaatatctcaaatgcaggtatttcgtacatcatctacaaacaacaattctacgcaccagtaaacaacatctacggaccagctaacacatggaaccaaatgccagaccgtggtagcgttactgaaaaccactatgaccacgttcacgtgtcatttaatgaataagtcagaataataaaaagtcacgcctggcgtgatttttttgatataatggagaaaaagacgaaagaaagaggaactctatttgcaagagtattctgttgaaattaccctaaatcacccagatgatgtcttgtcactttttgggaccaatgagcgccatctaaaacttatcgaggaaaacctaaatgttattattcatgctcgaacagagcgtgtgcagatccttggagatgacgaggaaagtattgaattggctcgtttgaccattcaagccctccttgttttagtggagcgtggaatgctagtcaacacttcagatgttgttgcggccttaaccatggctcaagatggttcgattgacaagtttgttgctttatatgaagaagagattatcaaggacaacagtggtaagcctatccgagtgaagactttaggacaaaaggtctatgttgatagcattaaaagtcatgatgtggtctttggaattggtccagctggtacagggaagacctttttagcggttacccttgcggttacagcccttaaacgtggtcaagttaaacgtattgttctgacacgtccggcggttgaggcgggtgagagccttggtttcttgcctggtgatctcaaggaaaaggtggatccttaccttcgccctgtttatgatgccttatatcaaattcttggtaaggagcaaacgacccgcctcatggaacgtgaaattattgagattgcccccctcgcttatatgcgtggtcgtaccctagaggatgcctttgttatccttgatgaggcacaaaatacaaccatcatgcaaatgaagatgttcttgacccgtcttggttttaattctaagatgattgtcaatggggacatgagtcagattgacttgccacgtcgtgttaaatcaggccttgtcgatgctatggagaaattgaagggaattaaggctattgattttgttcacttctctgctagcgatgtcgtacgtcacccagttgtagctgatatcattaatgcttatgaaaaagatgcacctaaggttgactttgaggaaaaaccagaggaagcaaacaaggttgaagaagaagcagcgtcaggattgactgaatacccagttattggtgctgaggatcttaaaaaataaatagctgaaaagaggtttgagagtctgtgttctcaacctcttttcctttgcagtcatgtcatcagcttttcccctatttctggtaaaatagaattgaatcacaggccagtaaggggggagagccatgactaaagcaaaaaaatggaagattgctatcattgtattgcttggacttgttgcgacagtcttgatagccataggagagggaagattttggaagtatcaagagaactatattccagacggcacttatcagatgctaaaatacgaggctaaatcggcatattccaatgaattgataaattggactgagcgaggagagaataatgatagcttatatgaggattttatagttgttgagaatatgaaatctcaattttattatgtttttgtgggggatggggaaccttttgtctcaccatttgagcatgatgaaaagctcccacagacttttgacccacgtacagggactttgaaacaggatctaacagtctctgaatatgaagctctagtgatttctcatatagataagatttctaaaaagggagaggagtattcaagagtaaaagaagtatctgtccaaaggtgtgtagacgattataaaaaaatgttgaagcaaaaaagaacttatgaaaagcgccctaatggtctcgttctgactgtttatgctaatgatggacatattgagtcgcgtagaacttttaaacgattgagctcagaggaagccaaaggggtcaaaagtggttatgatagggattatgagtatgccttgaagtattataattattcaaggcatgatggggattatctcatctggcgttgaaccacttaccgaccaagcagctcttttctatcgagaatcataacctaatgatttattaaaaaaccttacagtctttatgataattgtcaaatactatttcaccatttattttggtacaatagaacagtagaccaataaaaaaggagattattatgaaccagcaagagtggattgagtactttgaattagtcaacggtcgcaaaccaactcccgcagagttagctcaagctcaagcagcaggcgagtttatccttgaacgacctaaccctaacgtctttggctcaaatagacaggcgacggagcaaagaccgattaagccagctgaacctgtgataacgatgacacagcagcctcagtttgcccaaacaacagcaaccttccaacaagtcgtacctgctaaaaaaggtatgtctaagaaaactaagattattttggcatcagtctttggttccttggcagcaattttacttattgttgggggctactcactatggcgctaccaatcaggtaagattgcggatggaacatatgaggtagtttctttctctcgttatgatgaagacaaagataaaatggttgacggcatagatgaatacaagaaggaggatttggagtttcagtcttttgtagttgtaaagaataatcaatctagaacctacaatttagtagagagtgacaataaatcatatgttagtttgatggactatgagatagatgttcctcaggtatttgatccgtggaatagaacagagagtcaagttttagatgcggatcaagtcgaagatgtcacaaaagacttcatgaaaaagatgagaaaagactattcgttttataccaaagaggaagctgacaaagtcgttaaaaaaacaacaagagaatataaagataccttgaaggaaaaacgtacctatgtcaagcatggcgatgaatacactctgactacttatgataaaaaagggaagcttcagtcacgtattacttataaacgtatgagtaagggagacgctgaggagcgctgggatgactataaggatgccatcaaagattataagaaagatttgaagacttatagtgatcaatatgatgacttcaaggattactatgattatggttatggctacaattacggctatggttatggtaatgactatggctatggtaatagcgatgactatggtagtggttctaaatcaggctctgacgatagtaaaagtagtaaaaaatctagtgataaaatctaatcacccaatgatgtaaatgagtaaagtggtacgagaaggagagccaaaactccattctggtatcgcttttctttatatggaaataatcaaatagccttggagtcttttttctgttagaatggaagtatcaatgaaaaaggggacttttatgaacgaaaaagagtggttagattatttcgaaacaatcaataatcgtaagccgacagaggaagaaatccaacaagcaaaagctaatggggaatttatttctcaagaggctaaggacgagggtattaatccacagcaagctcagttgagtgaccaagtgacacaagccgtttcacaagttgctcctgctaagacaggcttgtctaagaaagctaaaattattattgcttctgtagtgggggcgattgtcctagtggcactttcatttggtggctatgcgtttatgcacttgcaaggcggtaaaatacctgaaggaacctatctgcttgaaacttatcgcttttaccataaagataagaagaaaatggttgatggtatggaatctttcaagaaaagtggtctagaggctcatgattttgttaaagtcaaaggtaataatgttaaattttatttttataccttagctggcgggaacaatctggttgactttacagactatgatactgacgaagcataccatccagatgcttggtcaggaacgcttaaaccaaccatgtcactatctgaatataccaaagtcattgaccaagcggtagataatcaatacaaaataagtgaatatcgaactcaggctgataacgatgaaagtaaaaagatttacgttaaatcctacaaagaatctcttgaagaaaccgttcgatacaaggttaagggtgatagattgatcgttacaacttataataagaaaggcaaacttattgaagaaagaagtttcaaacgcctatcaggggatgacgtgaagaaattagattatgactatgaacgtgatgttagagttgataaaaagcgcttccaaaactagtaatgtttaaaaccagcttagctggtttttttagtgtccaaaacgtgctataataagatgttatatcatcagtgttagcccatttgttaacacatgaaaggaaattaaaatgacaaaaacattctacatcacaacacctatctattacccatctggtaaattacatattggttctgcctatacgaccattgcttgtgacgtcttagcacgttacaaacgtatgatgaactatgatgtcttctaccttactgggcttgatgaacacggccaaaagattcaacaaaaggctgaagaagcaggaatcacaccacaagagtatgtggatggtatggctgttggtgttaaggacctctggcaacttttgaatatctcatacgataaattcatccgtacgactgatgattaccatgaaaaagttgttgctcaagttttcgagcgtctcttggaaaaaggagatatctatcttggtgaatactcaggttggtactcagtttcagatgaagaattcttcactgaaagtcagttggcagaagtttaccgtgatgagcaagggaatgtcattggtggggtagctccatcaggacatgaagtagagttggtttctgaagaatcatatttctttaaactcagcaactacgcagaccgtttgactgccttctttaaagaacacccagaatttatccaacctgatggtcgtatgaatgaaatgcttaaaaacttcatcgagccaggcttggaagacttggctgtgtcacgtacaaccttcacttggggagtaaaagtaccatcagatccaaaacacgtggtttatgtgtggattgatgctcttatcaactatatcactgcccttggttatggtcaggatgagcatggtaactttgatttattctggcaaaatgatgaaaaccacgaaattatccacatgattggtaaggatatccttcgtttccactcaatctactggccaatcatccttatggctcttgatttgccattgcctacacgccttgttgcccacggttggttcgtcatgaaagacggtaagatgtctaagtctaaaggaaacgtgatttatccagaaatgttggtagagcgttttggtctggatccactccgttactacctcatgcgtagtcttcctgtcggttcagatggtaccttcacaccagaagactatgtggctcgtatcaactacgaattggctaatgaccttgggaatctcctaaaccgtacagttgccatgattaacaagtatttcggtggtcaagtgcctgcctatgttgagaacgttacagactttgatgctgatttggctaaggttgtggctgaaaatatcgaagagttccacaaacaaatgaaggctgtagatttcccacgtgccttggacgccgtttggaacatcatttcacgtaccaataagtatattgatgaaacagctccatgggtccttgcaaaagaagatggtgacaaggaacaattggcagctgttatggctcacttggctgctagtcttcgtgtcgttgcccacctcattcaaccattcatgatgaccacttcaaatgccatcatggaacaacttggcttgccagtaacatttgaccttgaaaatcttgaactttcaggcttcccagagaatgtgacagtcgtttcaaaaggaactccaatcttcccacgtctggacatggacgaagaaattgcctacatccaatctcaaatgaacgcaggcaaacctcaagagaaggaatggaacccagaagaggttgaacttaagtctgaaaaagaccaaattaaatttgacgactttgacaaggttaaaatccgtgtcgctgaagttaaagaagtagaaaaggtcgaaggttcagacaaattgctccgcttccgtcttgacgctggtgacggtgaagatcgtcaaatcctctcaggtatcgctaaattctatccgaacgaacaagaattggtcggcaagaaacttcaagtcgtggctaatctcaaaccacgtaagatgatgaagaaatatgtcagccaaggtatgattctttccgcagaacatgacggcaaactcactgtcttgacagtagatccatctgttccaaacggaagtgtgattgggtaaaatatcataaaaaaacagtttatcaattttttgaattgggaaactgttttttactaatattcagttgtgagtaaagcgcttaaatagatctttgttgagttctcggcagttttgcttccttaaaaccggaaatcatctactcttaaggaaagtcttaagaggacttgttgtataagaaaacgagttcagtcgaactcgttttcttatacactatatttcaataaatgcttaatgcgttccacactttcatcaggtccataagcatttgggtatcggtctagtttactgatagcgtcaaggtctgcttggtctaggtggaagtcaaagctattaaagttttccttcattcgttcgatatgggtacttttaggaatggtcaaaatcccttgttgggtttgccatctgaggatgacctgggcaactgtcttgccatgtttttcagcaatagcagttagagttgggtcctgaaaaataccatcctctcctctatgaaaaggagcccaggcttgcgttagggtaccaaattccttatcagctttctggattagtttgtgttgtttatagggatgcaactcgatttgattgactgctggaattacaggtgtctgcaaggcaaaatccgccaaacgccctgttgagaagttagaaacaccaatggctctaataagttcttcatgcttaagctcaatcatagcacgccaggcaccatgtaagtcgccaaaaggttgatgaatcaaatataaatcaagatagtcagtatctagtttgcgaagtgtttcttttagggctaatttggtatcttcgtagccaagctggctaatccaggccttactagtcaggaaaatatcctcgcgagggataccagatgccttaatagcacgtcccacggcttcctcatttcgataaaggctagcagtatcaatcaatcgatagcctacagaaagagcatcttcaacggctttttgacattccttttgattaaaaatttgccagacaccaaaaccaagcacgggtattttgatgccattattaagtgtttgaaattccattttcttctccttagtggtggggtagtaagctatcctgaatttcctcgataaaagcttgaataattgcggattgtttctgtttattattggtcacaaaccccaaggtgtgctttggactgttcttcagtggaagtaaaacaatttggtccttaatgaaactattaacaataccgagaccagaagcgtaactatctgaggcacagagcagattcatgacactgcctcggtcattactgtaaattacttgttggtcaggcagaacctcgagaggatcttcgtcaaaatggattccagagctttcttgacgaaagcggacctgtgggtatccctctaaatctttgagattgagggattttttgtgagctaggggatgttggcgacctaagaaaatcttagtttcaaactctccaagtggggtgaaagtcagatccatgtgttggaaactgcgttcaaggatatggtcattgtcttcatctagataaataatccccaggtcactttcgaagctctcaacgcttttgagaatcttcctagtcgttgtttcaatcagttgaaattcttgataatcactacgaaaacgttgggcaatgtgagccatgggaagtgataagaaatcgtagtggtgactggcaacagtgaatgatttcttgaatgatttacggtaacgtccttctaggagatctaactctccaagaatacgtttggcgtatttgagaaaatcatgaccgtcatcagttagtttagctcctgtattggaacgctcaaagagttggacaccaagttcttcctctaagtcacggatggatgctgagagattaggctgagtcaaaaagagttttttagcagccttactaaaagaccctgtttcagcgatagtctgaacatagcgacattgttgaaaattcataagcatcccctttgaaaaatatgattgtaggtcatattataacaaaatgagaagtctaaaatcagcaaaattctgataggaatagatgaagacctgatatgaaatttctatgattaaatcgttttaggagtaattatggaaattgagataagtcgtaagaaagcagttctgataaatgaaaaactgcatccacaggttagacactgaaaatctaacttatgggatgcagtttgaaatattaatcattaagatatctaatggctttcaattttttaggacgaataaggaagagtcctagggcaattaaaggtagccagaaaatgaaattccagatacttgtagctggtgcagcctgtgttgattgcgagataaggacactgccaaaatcaatcaaaaagtgcagaataatagtccaccagaggctaccggtacgtaggtaaatagcagcaaagaatatgccataagctgttgcataataaacttggaacagggtagcgttcaagggctggtgagtaagatttccgagatgggccaatccaaaaaatatggcagacaagaaaacgactcctaaaacctgttttgaagatctaataccatcttgaaaggcgagcttaaggaaaagtccacgaaaaaaatattcctcaaaaaaaccggctcctaaggcaatagtcaaggcagttcctatcatgtgaggtgccttaatgataccaaaagcacccgcagaaagatagaagaaatctgctaaaagaaccaaccaacatacacttaaggtttcagaccaactgatctttttagttgattttatttttaatcctagtcgcttatggactaggaaatagtagccacaccctaggcctagtgtcttaatgagaaaggctatctcctctggcagtggcttaagaagcaaacgaagtacaaggttcgcaaaaataatactaaccccaaaaaggatcagtgtcctagtttctttttttgtcattgaaaagtcccccaactttcttaacatttttttcaagcatacgacgaaaaacgactaaagtcaaggacttgaaggtgttttttatgtatttttagttatgaagaggccggttcttgatgacctgcttctaatagaaagcctattctatcgttgaaacagtttattatgagaaaaaaatgaacggctgtaagaaagtaataagtgaaaactctgtaaaatccttacgaattataattaattgtaaagaaatgattaaattataacaaaagtgtgtcaaattttaaaaacgtgtagcaaatatataatatttttttcagaaaactattgccaaattttgaaaatcacgatagtatattaaacggtgaagaaaataggttaataaaatgttaaccaagaaggagaaagtgtaaatgaaagtcaatccatttaaaacaacattgtattcaagcgtattgcttgcaggactcgcggctacaagcgtagcagctgcggatgaagctaaagatgtaacagcaactactgatactgatgcaaccgtatcaaatacggctgcagaatcaagtgctaaccttgttaaaacaacaggtgatgcagcagttgttactacagtacctggaacagaagaaaaaactactactgaaacagatactactgtaaaaacaacaactaaagctattgctgaagtttcaaatcctgacttcgataacgctgttgaaactgcaacaacgactgcagcagcatcaaaagattctgctgatgttaaagctgtccaaaatcaagcagctaaagatgctcaagaagcttcaaatacagttgtttctgaaaataaattgactcgtgaagaagctgatgcagctctttcatctgctaaagcaaatgttgttgcaacagggggattcacagctacagaagaagcaggtgttaaacacactagcgtcgaagctgctaacaatgacaacaaagttcaaacaacagctttgacaactgcggtttcagaatataaacaaaaacttgcagattacaagacacaattggacaaatactatcaagacgttcttgcttatgctgcttgggaaaaatcatacaaagagtacactggtggaataacagctcgtcttttgacaaaaggcttggctgaaaatgctactggcttgatctataaaacagaatctgatgctactatgactgttgaaaactcagcaggttctgttgactacttggataaaacaatccaatcaggtcactcagtagatgaaatccttgaacaattcaacacatctcgttacattccaagtgacttcagtgcagctaacggtacacagtacactatcaatgctgacggtgaatacactgaagatgtatggttgaagatggctacaggtcaaacattgactgtaacatacaacaacctaaacggaacatcattcaatggtactccagttaagaaaattgttgcaacttacactttggtagaaacaccaagtacagatggttcagccattgttaagttgtaccacgatccaactaagacacttttcattggttcacaaactgacgacactaacaaaaaacttcacgttaagatgaacttgaacttctttgattctgagtcatcagtgacaccacttgatttgtctaagaacggatcagttttgagtatctcatcacttaaccactggaacactgagcttggaaaccacattgaaaaagttggtttgaatggtaatgaatacgttcaaattcctggttcatctatcactttgcatgaagatggttatgcttatgcaacaaacgataacgaatttgtggctaacggttcacgctttaacagtgacccaacagtggatccaacaactggtgaagttacagatgaaggttgggatgcgatcaacccagacggaacacctcgtacgaagaatgcctactatggcgctgctgcaacaatcttcaagggtgaaccaatggacttcatcgtaagcggaaataaccttaacgttccaactgcttactggttcgcaactaactcaacagtagttgttcctgaattgccagaagaaccaaacaaaccagttcttccaaacactgtttcagcaaaagttacttaccacaaaaactttgtatctgttgaagaaacaactgagaaaccaaaacctcaagtaccaacaactccaacagaacctacaccaggtaaacctgtaacaccaacatcagtacctgtaaaagaagaagctccagctcttccatctactggtgaaaaatcaacagcagcttctgcagcagcaggtgcagctatggtgacatcagctttggccttgttcggtatttcaacttacaaacgtaaacactaagataatacataaaaaagctaggaaaatttcctagtttttttagtttggaaaaatcaagttaaccagaaataataaagatgaaattttctgacatttcctggggttacttgatttagactgaaaaaagaaaaatagacatacattttctaattttttcaaaatcgcaactaaagcctatattataagcttttttctatagttaactatgtataaaacaagggtgtaaatattattttcaaaaaatatgaaataaattaattgacaaaaaattataatacagtataatagattgtgttaggaagagtttgtttttttggcagggtgactccctagtcaaaaaggactagcttagaatctggaattctaagttatcaaattccaatgtttcattgtgatgatttaaaaaagagaagatttaaacagcaaaaaattagattaatcgatttaaaacatcagcatcatcgtagcgggagctagcggtatttttaatccgtgtagagcaaacgacagattcaaaaacagcagaatcggtagagactaatcgtcaaaagcgaagagggaaagaaaataaagcagtaactgctaatatacctatcagaaggtggactaaacctaatgactgataggtggtatgttttgagagtggcatttttagccaatactcttctagaaaatagtatcttgtaagcagtgcgacgttctgcgtaaagaagctagagggaaagttcttcagattgactgactatcaatcacaagatactcttaactagaaaccattttggaccaacacggttttgcgtttgttggtattgaactgcacctagggaaatggtggttcaatgttagtaaataaagactttaacttgtaaaagtctaaaaattgttttatctcattatcaactcaaggattaagcttttattgggattgcggaacaaaagggtgataagcatattgggatgatgcttcagtgacggaatttgaccagatgtttgtgagagcatctgtctatgctacattagctatttttaatggttatgtgggatagaaactgttttcaaaatcctgattcctaggaaaattgggggattttccttgaagaattgagattgttgaaaagagatcaaatggactgagcggcacttgtatcccaaggtaagcaatacacctataaacctaagtttccatacagcagggagcaagtttcagtttgaatgggggacgcatctagagtaatctagatgtttttttattttgtgaattcttttacgaataagtaagagagtgcacaaaggagagagtcatgttaattgcaaaaaatcaggaggggaagctcgtttcagctctagaaaccagtttgcaacgtaaggaatcctatagctgtcctggttgccagggagttgtccttctgaaacatggccaggtaatgtgtccacattttgctcataagtctttgcaagattgtcagttcttctcggagaatgaatcggcccaacatttatcccttaaggcagctttgtataaatctttggttaatcatggtgaaaaagtaagtattgaaaaggttttgtctgagatggggcaaattgcagatttatttgttggcgattccctggctctagaagttcagtgttctcggttatctcagcaacgtttgagagagaggacatgtgcctatcaccaagcaggttacgaagtgcgttggcttttgggtgaggaactctggttgaatggacgtttaacagacctacagcgggactttctctattttacggctaagattggatttcacctatgggagcttgattggaagcgtgaggaaattagacttaagtatctcatctatgaggatatttttgggaaagtctattatttaactaaggcttggccgttaaccgaaaatctcatgacagttttacgttttccttatcaagcagagcaggttgagacttatcaagtaactcagcgaaagaaggtctcacatgtgattcaacgagaattaattgggaaaaatccaaggtggatgagaaggcaggaaaaagcctatcttaagggaatgaatttgttatgcctgtctgatcaggatttttttccacaagtgagatttccagaatctaagcagggttttgtacaaattagacagtcacttgaaggttttgaaaagctttttatgcaatattatcgaaaaaggcatttttcttatcgacaaactctctactctcccaccttttatgctaaaatagtaaagaatagatacaattaaggagaatattatgtcagacaatcgtgctcatttagaagagaaatacacatgggatttgacgaccatttttgcgacagatgcagattgggagactgagtatgaaagcactgttcaggatttgaagaaggctagtgcttatgcaggtcatctcttagattctgctaagaacttgcttgaggcaacagaactttatatgagccttatgcgtcgcttggagaaaatctatgtctatgcgtcaatgaaaaatgaccaagacacaacagtagggctttaccaagagtaccaagctaaggcctcaaacctttactcacagttgagtgaagcctttgcatactttgagcctgaatttatggccttggatgataagaaattagctgagtttaaagaacaagagccaggtcttggactttatgaccactatttcgaacgccttttggcaaacaaggaccacgttctttctcaagaagctgaggagctcttggcagcagcaggtgatatcttcaacggtccaacggataccttcaatgtcttggataatgctgatatcctcttcccatgggtatcagatggtcaaggggatgtggttgagttgacacatggtaactttatcaccctcatggaatctaaggaccgtgacattcgtaagggagcttatgaagcgatgtatgggacctacgagcagttccaacatacttatgcacaaacactccaaggcgttgtcaaggttcacaattaccaagccaaagttcgtcactataattcagcacgtcatgcagcacttgcagctaactttattccagaaagtgtttatgattcactcttggaatcagtgaacaagcatttgccacttttgcatcgttaccttgatttgcgtaagaaggtcttggggcttgacgagcttaagatgtatgatgtctatacaccactttctgagactgaaactgctcttacttatgaagaatccctcaagaaagcagaagaagtcttggcaatctttggtgaagagtatagtaaaggggttcatgcagcctttacggaacgttggattgacgttcaccctaacaaaggaaaacgttcaggtgcttactcaggtggtgcctatgataccaatgctttcatgcttttgaactggcaagatactttggacaatctctttaccttggttcacgagactggtcatagtttgcattcaacgttcacacgtcagactcaaccatatgtttacggagattacccaatcttcttggcggaaattgcgtctacaaccaatgaaaatatcttgacagaaacgcttcttaaagaggtcaaagatgacaagacacgttttgctattcttaaccactatttggatggtttcaagggaactgtcttccgtcaaacacaatttgcagagtttgaacatgctatccatgaagcagatgcatctggtcaaatcttgacagccgacttcatgaataagctttacgcagatctcaatgagaaatactataatctcaaagctgaagataactacgaaattcagtttgagtgggaacgtattccgcatttttacatgaattactatgtctaccaatacgctacagggtttgcggcagcaagctacttggctgaaaaaattgttcatggtactgaagaagataaggaagcttaccttacttaccttaaggcgggaagctcagactatcctttggaagtcatcaagaaagctggtgttgatatgaccaataccgactacttggatgctgccttcaaagtttttgaagaccgtctcgttgagttggaagccttggttgaaaaaggtgtgcacctttcttaaaaagaagttactatatgagagaatcattctgaatcaggatgattctttttatgtctaaaaaaacgaacgtttgctaaaaaacaagctctaattaatatggaaatacgttggtgagcatatttatagcccatggtttatattcatgatagactaaaaacctaacgttttatgttttataagtgaacaatgttcagaaatagaaagtaggtttttgtgaaaacaaccaatcgttatcttgtagcaacgtgtggtgtcttactccatcttatgttgggttctacctatgcttggagtatctatcgtaatcctattatggcccagactggctgggatcaatcttcagtttcttttgccttttcgttggccatcttttgtctagggctttctgcagctttcatgggacgtctggttgaaaaatttggtcctagagtgactggaagtatgtcggctgttctctatgctgggggtaacattctgacaggagttgccattgctcatggagagctgtggatgctttatcttggttatggtattcttggtggtctaggactgggtgtgggttatattacgcctgtttcaactattattaagtggtttcctgataagcgtggccttgcgactggccttgccattatgggctttggctttgcctcgctgctaactagtcccattgctcaatatctgattcaggcacgtggcgttgaacagaccttttatatcttgggagttgtttattttgttgttatgctttttgtctcacaattcattaaacgaccaagtgtagaggaagcacaactgttggctgacaagagtccaaaccgtcaggctgctgatttgagcaagggagttacggctaatgaggctctgaaatcatcaactttctactggttatggcttattctgtttatcaatatttcttgtggcttagcccttgtctctgctatttctccaatggctcaagatatgattgggatgtcagcggaatcagcggcggttgttgtaggtgttatgggaatctttaatggttttggtcgccttctgtgggcaggcttgtcggattatattgggcgtccgaagacctttatcctcctctttgtggttaatattgttatggccgtcctcctaattgtcctgcaagttccacttatctttgtgattgcgatggctgttctgatgacttgctacggggcaggattctccttgattcctccataccttagcgatatctttggggcaaaggagttggctacccttcatggttatattttgactgcctgggcgatggcggccttagtggggccaatgctcttgtcggtaacctacgaattgacaaaatcataccagatgaccttacttgttttcatcgctctttacgtggtagctttggtcatttcctacctcttgaaaaagatggggttacgtcaagtagcttaatgatgacgatttgatttatagataagaaaaatctctagcactcgctagggattttttatataataaaacacatggttaaatcatatagtaaaaacgcaaatcacaacatgcgacgtcctgtagtcaacaaggatatcgtggactacatgcgaacgcatcttcaggaaaataaagggcatttggctgaactggaggcctttgctcgtaaggaaaatattccaatcatccagcacgaagttgttgcttatttccgatttttgttgcagaccttgcagcctaagaaaatccttgaggtaggaacagctattggtttttcagcccttcttatggctgaatatgcgcctgatgctcagattacaacggttgatcgtaatgaagaaatgattggatttgccaaggaaaatctagccaagtatgacagtcgcaaacaaattaccttggtcgaaggagatgcagcagaagttttgcaagatttggacactgactatgattttgtctttatggactcagccaagtctaaatatatcgtctttctgcctgaaatcctaaaacgtctcaaggtaggtggtgtcatcgtctttgatgatatcttccaaggtggggacattgccaaagacatcatggaagttcgtcgtggtcagcgtacgatttaccgtggcttgcatcgtcttttcgatgcgaccttagataaccctggtttgactgctagtttggtccctatgagtgacggacttcttatgcttcggaaaaattctgaaaatattatcttaccagattaagcattatttaagtaagtgtggtataatagcagagatattgacaatttaaggagtagatagaatggctaaagaaaatgaaaaacttgagtcaacagaagaaactgttgaagaggttgtagcagacaaagacgcagaacaagagcatcttgatcgccaaaaagaagaagaggaaagcatcgccctcgccagtgaaaaagcgaaagaaaaagctaaacgtgctaaaactaaaaagacacgtgatgctggtaaaccaagctcaggtggtcgcttccttggaggtcttgcccttgtagctgtttcagctctcgttggtgcaggtgctatgtatgtttctctaggtaacaaaacaactgaagaaacaactttggtatctatgaagggtgatactgttactgttggtgatgtttttgattcacttaaaggtagcagccaaacacaacaaagtgttttgagtgcaactttgcaaaaggctcttgaaaaagaatatggtagcaaagtcagcaaagaagacgttgacaaagcttataagcaagcttcagaacaatacggagatcaattctcacaagtacttgcagcctatggtcaaacagaagagtcataccgtaatcaaatccgtacacaaaaattggttgagtatgctgttaaccaagccgcacaaaaagatttgacggaagcaaattacaaggctgcctacgataactacacaccaaatacagaggtgcaagtggtttcaactactgataaagcagttgcagataaagtagactctgaagctaaggcagaaggagcagatttctcacaagttgctaaagataacagcttggaagtgacttctaagacagttaactcagcttctcaagacttcccagcagatgttttgacagcagccttcaaacaagatgctaatgccgtctctgacgtggtgactgtttcaaacagctcaactggtgctgcaacttattacatcgtcaaaactgtttcaaaatctgagaaaaatgcagattggaaaaattacaaggatgatttgactaaggttatcatcaatggtaagaaagctgatactaacttcactaactcagtgattgctaaggtccttaagaaatataatgttaaagttgtagacaaggccttcagtgcaattcttgaccagtatgtgactggttctggggcttcatcaagttcatcatcaagctctagcaaataaatcacaagatagagttgataatgccattatcagcttgacctaagacctaaaacacgttaaaatggagagtaactgagagttttaatatcatgagacttttagttttccctttgagaatggtaatcatcgcttctgatacagaaaaatggcggtcgctgcgagccatggacgaatctggttacttgctactcaaagttcacaattaaagacaaataagaatgacaagttcattgaatgaaggtggtaccgcggttcacgtcgcccttcgtttagtggtcttgtcttttattctttgggtattttctgaatgaaatgtatggcaatattggaggtagcgtatgaaaacctattttgtcaaacagaagtttcgattgggtggcgaacgctttgatatcaaggatgatcaaggtagagttgcctatcaggttgaagggtccttttttaagattccaaagacctttacgatttttggtgaggacggtcgtgaggttagtcatatcaccaaggagccacttagtctcttgcctaagtttacagtagacttgcaggatggttcgagtttttacattcgtaaaaaactaacccttcttcgtgataagtatgatgtcgataatcttggcttgcgaatagagggtaatatttgggacttggattttcaactgcttaatagtcaaaatcaggtagttgctaggattcaaaaggagctcttccatctgacatcgacctatactgttactgtttatgaaaatacttacgccgatttggccatttccctgtgtgttgctattgactatgtggaaatgctcgagaatagctcaaaataagaaacatttatttaaggagaaacaatgaaacaacttacttcagcacaaattcgtcaaatgtggcttgatttctggaaatcaaaaggtcacgctgttgaaccatcagctaacttggttccagttaacgatccaacccttctttggattaactcaggggttgccactttgaaaaaatactttgatggctctgtgattcctgaaaatccacgtatcaccaactcacaaaaggctatccgtaccaatgatatcgaaaacgttggtaagacagctcgtcaccacacaatgtttgaaatgcttggtaacttctcagttggtgactacttccgtgacgaagctatcgaatggggttatgagcttttgacaagcccagagtggtttgattttccaaaagacaaactttacatgacttactatccagatgataaagattcatacaaccgttggattgcttgcggtgttgaacctagtcatttgattccaattgaagataacttctgggaaatcggtgctggaccttcaggaccagatactgaaatcttctttgaccgtggcgaagactttgaccctgacaatattggtattcgtttgcttgaagaagatattgaaaacgatcgttacattgaaatttggaacatcgttttgtcacaattcaacgcagatccagctgttccacgttcagaatataaagaacttcctaataaaaacattgatacgggcgcaggtcttgaacgtcttgtagccgtaatgcaaggggctaaaacaaactttgaaacagacctcttcatgcctatcattcgtgaaatcgaaaaaatgtctggtaaaacttatgatccagatggtgacacaatgagcttcaaggttatcgctgaccacatccgttcattggcatttgccattggtgatggtgcccttccaggtaatgaaggtcgtggttatgtccttcgtcgtcttctccgtcgtgccgtaatgcacggccgtcgtctcggcatttctgatgctttcttgtacaaacttgttccaactgttggtcaaatcatggaaagctattacccagaagttcttgagaagaaagactttatcgaaaaaatcgttaaacgtgaagaagaaacctttgcacgtaccatcgatgcaggttcaagcatgcttgacgagcttcttgctaaccttaagaaatctggtaaagatacgcttgaaggtaaagatatcttcaaactttacgatacttatggattcccagtggaattgacagaagagttggctgaagatgaaggcttcaagattgaccatgaaggtttcaaagctgccatgaaagaacaacaagaacgtgcgcgtgctagcgtggttaaaggtggttctatgggtatgcaaaatgaaacactcgccaacatcactgaaccatctgagttcttgtatgaggctgaaacagcagaaagccgtttgagcgtcatcgttgctgacgatgctcgtcatgatagtgtaaattctggtcaagcactccttgtctttgaacaaacaccattctacgctgaaatgggtggacaagtagcagaccacggtacgatctcagatgcagctggtacagtcgttgcgcgtgttgttgatgttcaacgtgcgccaaatggacaagcccttcacactgttgaggttgaaggcgaacttgttgtaggtgctaactacaaacttgaaattgaccacacacgtcgtcaccgtgttatgaaaaaccacacagcgactcacctcttgcatgctgcccttcataatattgttggtgatcatgctgttcaagcgggttctcttaatgaacaagaattcttgcgtttcgacttcactcactttgaggctgtaactccagaagaattgcgtgctatcgaagaacaagtcaacgaagaaatctggaaagcaactccagtaacaactattgaaacagacattgacactgctaaatcaatgggagctatggccctctttggcgaaaaatatggtaagaatgttcgcgtcgtttcaatcggtgattactctgttgagctttgtggtggtacgcacgttgccaacactgctgaaatcggtatgttcaagattgtgaaagaagaaggtatcggttcaggaacacgtcgtatcttggcagtgacatcacgtgaagcttaccttgcttaccgtgaagaagaagatgccctcaaagcgatcgcagcaacacttaaggcaccacaattgaaagaagtacctaacaaggttgctagccttcaagagcagttgcatgcccttcaaaaagaaaatgctgctcttaaagaaaaagcagcagctgcagcagctggtgatgtcttcaaagacgttaaagaagctaacggtgttcgttacatcgctagccaagtggaagtatctgacgcaggtgcccttcgtacatttgctgaccaatggaaacaagcagactactctgacgtccttgtccttgcagctcacattggcgaaaaagttaatgtccttgtagcaagcaagtctaaggatgttcacgcaggtaatgtcatcaaggttcttgcaccaatcgtatcaggtcgtggtggtggtaaaccagatatggccatggccggtggtagcgatgccaatggtatccaagatcttctttcagcagtagcagaacagctttaagatgtgatacaataaaagaaacttgaaaagataggatgaaaatcctatcttttttctttgtaagtggtattgaaagtaatgattgttttcgtttcataattgaaatagtgaatactgggtggtatactattacaaatcataaaaattataatagtttcaagtaaaagggagctagcgatgtttggacaagactttggtcatcggttaagagagttgagattagcacaaggattcactaaagaaaaattttgtgaaggggatgaggttttatcagtacgacaattgacacgtatagaaacagggaagtctcaacctaaattagaaaccttagagcacttggcaagacgtctgaatatatctttatcggaattgcttggagagaggactgtagtctcaaagatgccggtagaatacctcaatctcaaatatcaattgatgcatgcgactagtctagataagccaaataatctaatgaaactagacgaaaagctgggtaaaattattgatagctattatgatgatttgccagttgatgaacagagggttgttgatatcttacagtcaaaactttactcatatacttcaaagacacaccaaaaatttggtatgagcatattggagaagagtttaccatcattatgtgagaaaagggtatacactatcaatgatctactacttatagaactatatcaaatctcgttaggagatggtgatagtatgaggtcagatgggtttagtgaagggactttttatactatttgtagaaatctaataaatagttatgataatattcccacagagtatttatttttacttagggatgccttattaatggttccaatagttgaatatgaacgaaaaaagtttcatttatcggaagtagcattcaatcaactgcatcgcattatggaggaaactcatgattatcagaaaaaaccaattttgagaatgctagagggacagtatctatatgttgtaaagaatgatatttttgaggcaaaaaaggcctaccaagaagggataatcttggctagattattaggagatacctctttagcagacatcatatcagagaaaatgagagatgccatgaaagaatagagcaggacatacgtgtcctgttctttttttctaatatgcagtatattatatccataagaagaactaaagaatataacgtatttcatcgagatttttgaaaatgacacagtctaaaatagagtattaaggagaattattatgaaacctgctacaaaacgtttcacaactttaactgcacttgctttgacttccgttctattacttggtgcatgtggtaataacaagaaggaagctacattaacatcgagctctagtaaggttagtcagaaagtgaaatcgacaaaaccatcttcaaaagaaaaaacgaagaagtctgagcaaaagacaaaaccttctagttcagaagaggtctcaaaagcaacctctggagaaacggcttcacaaccatcagccggaaatgtcgctggatctactcaacaagaagttgctccaacaaatcctagtgaagaaacagctgaagtaaatcaaggaactacgacagaacaaccagctgcttcagcggaacaaacaccagctaccacagtagttgatgctacggcaatggctaatggtgatttctctagtgttgctggtacttatcaaaatgacttaggggacacaattacagtatccccatccggtagtgtaacccgtgttggtgctgaaagtggttatagtgatacaagtagtcagctctttaatggttttgctcaagatggcggttatgtagcaggttttgctcataatgatgggccaaccagtgacccaattttctttgatagtaacggacagattcgtttcggttctgatgcgatatatggtcggatgcatgtttacaataaattagattaatggtattgtccctcagtacttaagaaaaggaaatcacaagtagtagaaggagcacactttaaaaatgtctcaaaaagaacatggagaagtgagaagtactagtggtaccttaaagggtgtctatcactatttgaattctcccagtcctcatttgtttccgtttgtctttattagtaacgtaacagatagccttcagatgtttcgcgtgtgtaagaatggtaagccaattgcctttccagtacttctaccaaatcaatataaaattgtttacattaaggattttaaaaatgttagctcctgtgatgagattacagtgactgaacatttagaagaatacatttatgatgaatcagacttagactagaatgatatctatagtcaatttaactcggaatgaattgattaatctattcagatttgcttagtgtgtcaagaaattagatgtaggaaaagtcctcaggtagttcttggggtttttcttaattatagttatttgaaagaattagatatcaattttctacaaaataaactttagtaataatattgaaataattgtaaaaaatatttcaaaggggtataatagaaatgtgaaaacggttccaatgtttatcaaacagcctagaaagtgagagtgatcaaaatgagaaaggcatatgttgttaaggaacgtcaacgttactcaattcgtaaatattcttttggagctgcatcagtcttgattggtgcgagcttgatgcttggtggacatgctttggctcaggaacaagccaacagcacaagtaccagcaaggattttgaagtttttgtaaataattctgaaccacttcaaatcgaccaggcaacttcagaagctgttaccgatgtcctcaatcaaccagcttcaagatctgaagcgccaagacttaagcttgctagcagtgaggttgcctcttctgaagctaatagtgtagtggctagcgaggctgcttctttggaagtaccggcagaggttgctcattctgcatctgctgttgctactgtttctagatcagaagtggctagtccacgttctgaagtgtcatcagtagctagctctgaagtagcaagtgagactaaccgttcagtaacttcggaagtagcagaagctagagttactgaccgtgaagctgtggatactcctcaacctggtgtggatggtccagtgactgctgatggttctcttgatattccatcaaacggtacctattatttccgtcgcactactgaaattcgtacagctccagtcatggatatcaaacctactttcgtctttagtgcaggtgaccatgttatttatgataaggtcttgaagagagataatcaccaatggatttcttacattggttacgattatgaacgctactacgctgatatcgcagctttgaaggctgaaaatactagtagcaacactgaggcgactagagatgaaaccatccctgaacgtggtacttattacttcactaaacctgcagatgtgaagaaccaacctagcttgactgctaagactgagttcaattttgatccaggtatgtcagtcaactacgatagatctttgcttgctgacaaccaccgttggatttcttatgtgtcatacaatggtactcgtcgttacgtcgatctaggtgctgcagcagaggctgtagctaaaccaagaggcgatattgctattgaaagccatgataatggtgactttagtgtggttatcagtaatgtttcagatcaaaacggtgtccttggggtatctgttccaatctggtctgaaaagaatggtcaagatgacatcatctggtacaatgcgactcgtcttaacaatggtaactacaaggttaacgtcagtctaactgaccacaagaatgaacgtggtctctacaatgttcatctttactatgttgaaactaatggtaaattagttggtgtgggtggcacaacttacacagttcctgccaaagttgaagaaactcatacaactactagctatagccttcctgatgcaggaacttacaccttcagagaacgttctagcatcaaggcagaacctcgtgtggcaagtccagagttggcctactacgatgctggcatgtcagtcaactacgacaagattgtcagtggtgatggttaccaatggctttcttacctcagctacaatggcaaccgccgttatgtagccgtgtctaaacttgctcaacaagaaagcaaaccaagtggtactatcaatattgaaaatctctctaacctcggtttcgatgttcatatcactaatgtttctggtggtgataaggctatccaaggcgtaagtgttccagtttggacatccaaagacggccaagatgatcttgtatggcaccaagccgacagacaaagtgatggtagctacaaggttcgcatcaatgttagtgatcataaggctgaaacaggcgaatacattgtccatctctactatgttcaagatggtaagatggtaggtattggaggcactagcacaactgttccagttcaaaatgcaactcgccacaatcttccagcctcaggttcatacacctttactgctcgttctggcattaagactcaacctttggtagccaaccctgatgttagctactacgatgctggtatgtcagtcaactatgacaaggttgtcaataatgatggctatacatggctttcttaccttagctattcaggacatcgtttctatgtggctatcgcaccaacgagtgtaactaaacctgtagaacaaccagtccaaccaagtacaccttcatctggaacctacactttcaaagaacgctctagcattaaagcagaaccaagtgtggaaagtccagagttggcctactatgatgctggtatgtccgttaactatgacagattggtgactgcagatggtcatacctggctctcttatgtcagccatggaggcaaccgccgatacgttgctattgatgctaaggcaacagcagttgctcaaccagcaagcccaagcttagcggcaactggcacctatacctttaccaaacctagctcaatcaaggcacaaccaagcgttgcaagcccagagttagcctactatgataaaggcatgtccgttcgctatgacaaggtccttacagccgatggccatacctggttgtcttatgtaacctatagtggtgcaagacgctatgtggatatttcttaagattcgtaacatcactctcttttgagggtggtgtttttttggttgattggagcaaaaaaatgttacaaactattgttttttttgtaataaaactgtaaaataggtaaagagaacaaaaaatctcattttaaataaataagagaggttcatttattaaagaaatgctctaacttagaatttctcttaagattatgctaaaggaagttatgccatgcttaacatctatgttttagaggatcattttatccaacaaaatcgtattgaagaggttattcatacgattcttaagaaaaataatattaaagtgggtgactttgaggtttttgacaaacccaatcaactgttagagtctattaccgagcgagggtctcatcagctctttttcttggacattcaaattaaagacgatactaaaaaaggtttggaagtggctaagcagattcgcaagaatgatccctatgccaatattgttttcttcacgactcattcagagtatcttcccttaacttttcaataccaactggcagctctagactttattgataagtctttggagggtgaggactttcaaaagcgtgtggaaagtattatcttattaacctgcaaaaagatacagagtcagaatccagaagacgcttttcggattgagaatgtaaagaccgttattcaggttccctttcatgatatcttgtactttgagacgtcagatattgttcataaggttatcctttatactaaagaggagcagattgagttttatggcagtctctcacaaatcgaaaagagtgaccctagactgtttaaatgccacaaatctttccttatcaatccagaaaatatcatcaaattagataagagtacggggacggtctattttgaaaatggtggtgtctgctatgtttcaaagttgaaattaaagaaattgattgagagaatcagcctatgacagcgataaattttgtgttggataatctagattttttagcggagattatcctctttattctcatttatcaatacattacctccgagaagataaagctaagatggtatatcatcatccccttgattatccgatttttgtttgtgctttctccagcactatcctatgttttagggcatgccttcttggttgtttattccctctacagaaatcgttatggcaataggttattagatattttctatggcttgtttccaatcatcatagaaagtcttgttcacaatcttattatttatgggattgccttagtcatcaatcgtcattatctgattgtacttaaccattttcatttaaaccttgtcattgagttgctagtctttcctgtgttttggttaatcattaagaccttaaaagtggatttcaaagcattaaactatggttttcgaaagtcattttcaaagtacttcttattactcatagatatatcaatgttatcttatgccctccttctccaatatattaccttttttgtgcaacagagccctggaggaagagattggcatgtttatctcgtggtgacctatgctttactctttcttgcgacccttgtttatatcaatgcgaccttcagtgagagactaaaagaagaagtcctactccaaaaagataggcaaatgagtgatttggctcattatagtcaacaaattgagaaactctatactgatcttcgtcgatttaggcatgattacctaaatgttttgtctagtatcaaatatggcattgactccaaagatatagctatcatttccgatatctacgataacatccttgaaaaaacaaagactcggattgaaggaaaacagtacgaaattgccaacttgattaatattaaagatgaagccgttaaaggtgtcctggctagtaaaatcttggaagcacaaggccagtctattaccatccaccttgaggtcagcgacgtttttgaagtatcgaggatggaattattggatttcataacagtgctgtccatttttttggataatgctattgaagctagtctggatagcagtactaaagaagtgaacattgctcttattagtggagagacaaaggtagtaatagtggagaataccattgctcaagaatctatcaatacagtcggtatctttaaacttggtcgctcaagtaaaggagagggacgtggtataggtctgtccactgttcgagagattttagggaagtaccctaattgttctttgtcaacacaatctaaagactatcgttttaaacagacactaaaaatagaagatgtggtttgattatgacgaaaaaacgactgtttatgacttcaatgaaaaatttagctatctatatattataataacctagtaaattatcagaaaaggaacatcactcatgaaaaatacaagtaaactcattggtatcctatcagctcttattgtagttatcctcgctgtcttcttagtggctaagtttaatagtcatgagtcggcgcgtgttagcacaagtagtagcccagccaaaacggttaagaagtcatcttcaagctcaagtaaggctgttaagaaggataagaaaaattcaaacccgcatgtaaaaaatgaagacacaaaagatgaaacagttgaggttagtgagtcttctgttgccaaagattctgcaactaaagacactgatgaaacggtcttatcttcaggagaagtttctgagcctacaaaagaaaaaacaggagaagaaacacaatcatcatcatcgtttaatgggaagcaactaagttcaggtgattatagttcaatcgctggtacttggacaaactctcgaggagaatttgttacaatttcaccagatggcacagtacaaaatgggagtggttatacttatcatctctattctggacatttaaataatggaaatttttcaggaacaattgcttctgatattgatagcgcagctttttgggctattcctggaactggtaatggcgattcagaccatcttgttattggtcaaagtgatgatgcagaaaattatccattttatcgcaattaacatgaaaaaaagattgctattttaatagtgatcttttatatttttcttcacttttttctaacaaaattacgaataaataagtatggcttgcttcgactttcgattatgacaaaaattggacagtttatgatttaggtgtgaacaagtcaaataaatttggtatactaatggacaagtgagaaatattcagtaatattctgtaaaatacttgtaatatttgtcaccgagtgttacaatcaaacagtaacatcaattcgatagagagaataattgatatgaaacgagcaaaatttttacacgaacaacaacgtttttccattcgtaaatattcatttggggcagcatcagttcttttaggagctagtttggtctttgcaggtcaagctttggctgatgagcgtcatgaggtttcaacaccttcagatgcttctttgtttgctacctcagatagtgatgctgtgacagcagctgatatcttcagtggtgtagcgaccgatggggtagcatcaagcgagaaagctagccaagtcttaacaactagccaaaccgctagtgaaactgctactagcgaggctagaagtgaagtcagtgcctcacaaacagctgataaagcatctgaaactgcagtgacctcttcagctgtggaaaatcgcacaaatttagctgaaaaagatgctaatcttgatgtatctagtatggtgagagcggctgtaaacactagtttggtgagccaaccagctacaactacagacagcgaccttccaagccaaggaacttatgtctacaaggaacgtacagagattaagaatcaacctaaggtgtctgccaaggctgaattttatgtaaatccaggagacagcgtcctttacgatcaagtcgtgacggctgacggctaccaatggattagctacaaatcatactctggcgtgcgtcgttatgcgccagtgaaaccagtggcagctggtagtggtaacggtaatagtggtaatggggatggtaagccttctaatggcactcaagccacaacaggtgctttgaacatcccagcgacaggaactttctactttacacgtgacacagatattaagaaagaaccaaaagcagacctcaaacctacttttgttttcagtaagggtgaccatgttatctatgacaaagttttgactgcggataatcaccaatggatttcttaccttgggtatgactatgttcgctattatgcagatattgcgactttgacacctgccaaagctgaaacaccaactgttaaaccaacagagactaatcaagcaaaaccagaaactactggtgctgaaaagcttccagcaagtggtacttataatgtgacacgtagcttgaatgttaaaaatgaacctaaggcttctgcagaaacactttataccttggaaaaaggctacaaagtgaactatgacaaggtcttgactgcggataaccaccaatggatttcttatattagctacagtggtacacgtcgttatgtggatattgcgaccttgaaagctactgagtctaaaccacaagaaaaccgtgtttctggtaaccttaccatcaacaaccaaacgtctaatggcttcgatgtagtcgtaaccaatgtttcaggtggtggcaaggcagtccaagaggttcgtgtcccaatttggtcagataaaaatggccaagacgaccttacatggtatcatgccgacaaacaatcagacggaagctacaaggttcatgtagacacagctagccataagggtgatgctggtacatattctgtccatctttactatatgttagatggcaagagaacctatatcacagaaactaaagccacagttcctcaatctactgaatcccaagtaacagggaaattgactatcagcaaccaaacttctaatggttttgatgttgtcgttactaatgtttcaggtggcggcaaagaagttaaagaagtccgtgttccaatctggtcagataaaaatggccaagacgaccttacatggtatcatgctgacaaacaatcagacggtagctacaaggttcatgtagacacagccagccataagggcgatgctggtacatattctgtgcatctttactatatgttagatggcaagagaacctatatcacagaaacaaaagcaacggtccctcaatctgttgaatctcaagtgacagggaaattgaccatcagcaaccaaacgtctaatggctttgatgtagtcgtaaccaatgtttcaggtggtggcaaagaagttaaagaagtgcgtgttccgatctggtcagataagaacggccaagacgatcttacttggtatcatgccgacaaacaatcagatggaagctacaaggttcatgtagacacagctagtcataagggcgatgcgggtacttattctgtccatctatactatatgttggacggtaagagaacctatatcaccgaaactaaagctacagtccctcaagccactgaatcccatgcaacagggaaattgacaaataacggttcttactacagtgttcgtggtaaatacgatgacattattattgtcaataaaaaacatggcctttctaaggactataacccaggtgagaatcctacagctaaggcagcctttgttcgtcttcgtgatgatatgattaaccaaggtttgaatgttggacgttcatacagtggtttccgttcttatgactatcaaaagactctttacgacaactatgttagtcgtgatggtcaggcagctgcggaccgttactcagctcgtcctggatatagtgaacaccaaactggtttggtctttgatttgactgataaatctggtaacttgcttgaagattcacgagctagtcaatggcttaaagacaatgcacataactatggctttatcgtgcgtttccaagcaggtaaagaagcttcaaccggctacatgccagaagcatggcatatccgctatgtgggtaaagaagctaaagacatccacgattcaggattgagcttggaagagtactttggtattgaaggtggcgattatgctactagcagcaaacctgctgaaagcaaaccagccactacaggtgccatcaaccttccagcgacaggaacttataccttcacaggtcgtgcgtcaatcaaggcagaagctaaagtttcaagcccagaattagcctactatgacaaggggatgagtgtaaactacgataaggttctcacagctgatggccgtcaatggctttcatacgtgacagcaagtggtgctcgtcgttatgttgacattgcagcagccaaggcagaggctaagccagaagtaaaaccagttgctaaaccagtggataaaccaagtctcccagaatcaggtcgttatactttcacagaccgtgcgtcaattaaggcagaagctaaggtttcaagcccagaattggcctactatgacaagggcatgaccgttaactatgataaggttctcacggccgatggtcgtcaatggctttcatacgtgaccgcaagtggtgctcgtcgttatgttgatattgcagcagccaagtcagaagctaaaccagaaacaaaaccagttgctaagccagcggataaaccaagtctcccagaatcaggtcgttatactttcacagaccgtgcgtcaattaaggcagaagctaaggtttcaagtccagagttagcctactatgacaagggcatgagtgttaactatgataaagttctcacagccgatggccgtcaatggctttcatacgtgacaacaagtggtaaccgtcgttatgttgacattgcagcagctaagccagaagcaagtcaaccagccgcaaaaccaagtctcccagagtcaggtcgttataccttcacaggtcgtgcctcaatcaaggcagaagctaaggtttcaagtccagagttggcctactatgacaaaggcatgagtgttaactatgacaaagttttgacagcggatggtcacacatggatctcatacatgacagtgagcggtgctcgtcgttacgttgatattgcttaatgaagtaatgaatcaggttggacaatgtgtccaaccttttttgataggctttctttatcatgagatttaatttttcaatttttgtgacgtcttttggagtgctataatggttaatatagaatcgaggttactatgaaaatcgcattggtacagatggatgttgctcacggacaacctacggaaaataaaaagcacgtgaaagaaatgttggaaagggcccttggcgaaaatcctgatgtcattgtgcttcctgaaatgtggaatactggctatgctttagatgaactggatgggcttgcagataaggatggtttgaattctcaagaactcttgtctcattttgctaggaaacatgctgtggctattatcggagggtccgttgctattgagaaggatggcaaattctacaacacaacctatgtctacaataagtctggggacctaatcaatacttatagcaaggtccatctctttggcctcatggcagaggaccagtacatgtctgctgggtcttcggagtctgtatttgagcttgatggtgtgacagttgctagtgtcatttgttatgatatacgttttcctgaatgggtgcggatacagatggcacaaggagccaaggtactttttgtggtagcgcagtggccagaacctcgtgtgcagcagtgggagattttgttaaaggcgcgtgcggttgaaaatcaagcttttgtagttgctgttaatcgtgtcggaacaggaccagacgatgtcttttcagggcattctatggttatcgatccacttggaaatgtggtcttgcaatccaaggagcatgaggagggcatttttacggccaatattaatcttgaagaggtagataaggttcgaggtcagattcctgtttttgaggatcgtcgcacggacttgtatcattaaggagcgtttatgttatttgaagaatcggacttattgaaggcattgccagaacagttttttgcaggtttggttgctaaagttaatgccaaggtagcggaaggagcagatgtgattaatctcggtcaaggcaatcccgaccaaccgacttatgaccatattgttgaggcgctgtgcctttcagcgaaaaatcctgctagccataagtattcccagtttcgaggcaatcgtccttttaaggaagcagctgctagtttttacaagaaacattatggggtcaatttggatgcagagcgtgagatttgtgtcatgggtggagctaaaattggactagtggaattgcctctagctttgatgaatcctggcgacctcttgctcttgcctgatccaggttatccagattacttgtcaggagtgagtttgggtcgtgtgacctatgaaacctttcctttgacggctgaaaatgatttcttgccagatctggatgccattccagaggagacagctcgccgcgctaagtttatctatatcaattatccgaataatccgacgggggctgtggcgactaaggccttttatgaaaagttggttgcttgggctaagacctacgaagtaggagtggtgagtgatttagcctatggagctttgggttatcaggactatgagaatcctagctttttatcaacgcctggtgctaaagatgtgggcattgagttctatactttctcgaaaaccttcaatatggctggttggcgtctggcctttgcggctgggaatgagcaaatgattgaagccttaaatctgattcaagaccatctttttgtgggaatctttcctgccttgcaggaggctgggattgcagctctcttagaccctaaatctgaggaggctgttgctcaactgaatgcgacttatgatagccgtcgagatgcttttgtccaggcagctgctaagattggctggcaggcctttccatccagaggttctttctatgcttggatgcctgtgccagaggggtacaccagtgagagttttgcggatcttttgcttgagaaggcccatgttgctgtggcaccaggtaaaggatttggtcctgcgggtgatgcttatgttcgcattgggcttttggtagagccagagcgtctggtcgaagcagtcaatcgtattgccaacttgcatttatttaataactagatagcaattatgaaaacaagtagttgaaaaagactgcttgttttttcatattaattacattttcctcttgacaaatgaataaaaatgcaataaactggttacatatttattcaaaaggagtgcataaatgaaagtttcaatcgttggtatcactggttatagtggtttagagttagttaaaattttgaataatcataaaaaagtggaacttgtttctattcacgcaaccaaggaagtgggccgacgattgtctgatgtgtatccctatctgacaggtgtttgtgacttagacattgaagcttatgatgcggaaaagattattaaaaaggcggatttggtcttctttgccacaccttcaggagttgctagttcgcttgcagaggaatttgttcaagctgattttcctgttattgatttatctggggatcatcgcttgccggcagatgtttatcaagaatggtataaaaaatcacctgccaagcagagtgtgttgaataaatttacatatgcattatcagaatatacagatgtgaaggataagaaatttattgccaatcctggatgctatgcaacagcgacggagttggccctgattcctttggttgcttctggtctgattgagacggatagtgtcattgtggatgccaagtctggtttaactggtgcgggtaaggctttgagtgagtctagtcattttgtcaatgttcacgataattacgtgacttataaactcaatcatcatcagcatattcctgaaattgttcaaaccttgcagacctttaatccggaaatgcctgagattcagttttcaacgtcgcttttaccagttaatcgcggaatcatggccacggtttattgtaagttgaagaagggcgttactgtagctgatgtggcttcagcattcacaaaggcttatgatgataaaccttttgtacgtgtgcaagataatttgccagaactacacaacgttattggatcgaattttacagatattggctttgcctataatgagaaaaccaatgttctgacagttatttcggtcattgataatttgatcaagggtgctgctggccaagcggttcaaaatctcaacctcatgcaggggtgggatgagacggaaggtttgcttctgacaccgtcatacttgtagatctaagcatagagttaggagaaaaaatatgaaagtcatagatggaacaattgctagtccgttaggattctcagcagatggactacatgcaggatttaaaaagagaaaaatggattttggttggattgtctctgaaaagccagccagtgtggcaggagtttacacgaccaataaggttatcgcagctcctttgatcgtgaccaagacctcagttaaaaaggttgggaaaatgaaggcaatcgttgttaactcaggtgtagccaattcgtgcacagggactcaaggcttggaggacgcttacaccatgcaggagtggaccgctgaaaagttaggtgttgaaccagacttggttggtgtagcttctacagggattatcggtgagttgctaccaatggatactttgaaaaatggtctttccaagatagtggttaatgggaatgcggatgattttgccaaagcaattttgacgactgatatagcgactaagactattgctgtgacggagacctttggacgtgatgtggtcactatggctggtgtcgctaagggctcaggtatgattcaccctaatatggcgaccatgttaggatttatcacttgtgatgctaatatttctagtgataccctgcaattggccttgagccaaaatgtggaaaagacctttaaccagattacagttgatggggatacttcgaccaatgatatggttcttgttatgtcaaatggttgcacactaaatgaagagattctgccagatacaccagagtttgataaattttcgaagatgttgaatttcgtgatgcaagagttggctaagaaaattgccaaggacggtgaaggtgctaataaactcattcaagttgatgtggttaatgcccctaaagcccttgatgcacgtatgatggccaaatcagttgtcggttcaagcctggttaaaacagctatctttggtgaagatcctaactggggacgtattttagctgctgttggctatgctggtgtggatgttcctgtggataatgttgatattatgattggcggtctgccagttatgttggcctctagtcctgtctcctttgatgatgaagaaatgaaagacatcatgcatgatgatgaagtcactataacagtagatcttcatgctggtcatgaaaaaggaactgcatgggggtgtgatctttcctacgattacgttaagattaatgctctctaccatacttaagttatctatgataaaggagttaactgatgactactgaatatattgtaatcaagattggtggagtagccagtaaacagctaactcctgagatactgaccaaactgtcagaatggcagcaggctggtcaaaaaataatcatcatccatgggggtggttttgctattaatcagctgatggaggagaatcatattccaattcacaaggtcaatggtcttcgtgtgactggtcagtcagatatggccttgattagagaagctttggttgacatagttgggaaaaacttagcaggtgagctgacaactgcaggtttgccagcctatcaggtcatagatgagcttccggaccttgttcatgctgatttcttagatcaagagacctatggctttgtgggtgaggtcaaaaacatcgccaatcagaccttagtagcactccttgctcaaggtaagatccccttgattcctagtttgggttacagtgagcagggtgatttgctcaatatcaatgcggattaccttgctagagctgtggcaattagtctaggtgccaaaaaacttatcctcatgacagatgtcaagggtgttttagagaatggacaagttttggagcatctgaatcttgtggacgttcagaaaaaaatagattcaggtgtgattactgggggcatgattcctaaaattcaaagtgctgttcagacagttcaagccggtgtcgagcaggtcattattggtgataacctgacagatggtaccataatcaaggagtaagagatgacaaaactattttcaaactataaacgggcagcgattgatttcgcttcggctcaaggcaattatttgacagataccactggtaagacctatttggatttttcatctggtattggggtaactaacctgggctatcatccccatgtcaatcaggctttgacagagcaggcgggtaagattttgcaccagcctaatctttatcacaatcagttgcaagaagatgttgctggacttttaattggtgacaaggactatctagcctttttctgtaatagtggtgcagaggccaatgaagcagccataaaaatcgcccgaaaggcatcaggtaaacaagaaatcattaccttccaaaattccttccatggtcgaacgtttggatccatgtctgccactggtcaggataaaatcaaacaaggctttggtgaaggtgtgccccactttagctatgctattttcaatgacatagatagtgtcaaggccctagctagtgacgaaacagcggctattatgttggagttggttcaaggggaatcaggtgttcaacctgctgataaggactttgttaaggctttggatgacttttgtaaggagacgggtatttatcttattgtagatgaggttcagacaggaattggtcgtactggtaagctctttgcttatgagcactacgatattgaaccagatatctttactctggccaaaggtttggcaaatggggtgccagttggtgccatgcttgctaagtcatctcttggagaagccttctcttacggaagtcacggctctacctttggaggaaataaactggctatggcggcggccaaagctacgcttgaagttatgttggtcccaggttttctagatactgcctttgaaaatggaaacaagctacaagcacaattgcaggcagctttatctgataaagagacagttaccactgtacgtggtttgggctatatgattgggattgagaccactggcgatttgggagaattggtccagtcagctcgagataaggggttaattgtcttaactgcagggacaaacgtgattcgtcttttgccaccaatcaccctaagtgatgctgaaattgaaaagggtgtggctctcctatcagaaatatttgactagaacataaaaatcacttgattcttgaatcaagtgatttcttttactcattgtcagtatcaatctcgctgagaagtcctttagctgttgttgttggcagaatacggacacgattaagtgagagaagaccatccttggcactggctagcccttcgttggttgttagtcctaacttgtaagttttcttagctaggtcaagtgttgtttgattgtagcgacctgatgggtaggcaatggtattaacctttgtattgagtttattttcaaggaagtcaatagaatccgttaattcaaccttttgtgttgccttgtcagtggctgacaaatcagggtggtttaccgtatgagactggaagctcataccgtgagccatcatttctttcatctgtttgacggtaagatttccagcatttcccttcttaacaaagccagtgatgacattgttggtcgccttagccttgtattttttgagaatcggataggcaatcgtatagaaatcttcgttaccatcgtcaaaggtcagccagacaaccttcttagcaggcaaggcattttcagtgaaggccttataggcttcttcaggcgttaggaaatagtaacctgccttagccaaggccttgatttgtgcctcgaagaggtctgggtcaacgataaggttggcgttagaggcctcagatggatccatgacgtgtaccgcatgatacatgaggataggaatttgtacaggatcgtcataggttttccatttagctgtcgtcttagactgactggtttgagcctgttgttgcttgcttttcgactggtttgggcgatttagcataaaaactgccaatagcccaagaaggacaaggtttaagacaagcagtagaaggttcattttttttctgttagcttgacttgtttttttcttttgagaagtcattgtatcccctttcaaataggtctagctattattctaacaaaaatggggtggaaatgcacagaattttcagtaaaaaagaatactcagctccttaaatggcaacaatattctgtcaattccgatagaaatatggtacaattaaaaaaatgtatgtttttaaggagaaatcgtaaatgtctattaaaattggattgcttggctttggtacagtagctagcggtattcccttcctcttgaaggaaaatggtgaaaaggttcttgcagcctcacgtgatcaactcgaaattgccaaagttttggttaaagatgacgaggaaaaaaatcgtcttatcgctgccggaaacgactacaattttgtcacaaatgttgacgaaatccttaacgatgaagagattcaaatcgttgttgaattgatgggtcgtatcgagccagctcgtaccttcatcacaaaagcacttgaagcaggtaaaaatgttgtttctgccaataaagacttgattgccactcatggaaaagagttgatttctctagcccaagataagggagtggctttctactatgaagctgccgttgctggtggtattccaattttgcgtactttggctaactctttgacgtctgacaaggtgacccgtatccttggtgtactcaacggaacatctaactttatgatgactaagatggttgacgaaggttggtcatatgaggacgctcttaagactgcccaagaacttggttatgccgaaagtgatccaaccaacgacgttgaaggtattgacgctgcttataaagctgttatccttagccaatttggttttggtgccacaattgatttcgacgatgtgactcacaaggggattacaaatatctctactgatgatgtagctgtcgctcaagaattgggttatgtcatcaaattggttggtgatgtgcgtgaagtagaatcaggtatctcagcagaagtatcaccaacattcttgccaaaaaatcacccacttgctagtgtcaacgatgttatgaatgcagtctttgttgaatctatcggtatcggcgaatcaatgtactacggtccaggtgctggtcaaaaaccaacggcaacatctgttttggcagacattatccgtattgctcgtcgtctttcagatggcaatgttggtaaaccattcaacgagttccgtcgtgacttgccattggctaatccagcggacgttaagagcaactactactttgcccttgatacgccagacgaaaaaggtaaaatccttcacttgtctgaaatcttcaactcagaagatatttcatttgaacaagtcttgcaacaaaaagcaaatggtacaacagctcgtatcgttgtgattacacatgctatgtctaagacacagctcaaagctgttactgaaaaacttgaagcagcagaagatttcacagttgtcaacacattgaaagttttgtctaactaattgataagcccatactggtgcatataagaaaggtattcaaggagaaaagtcgctgatggctttcctccttttggtgtattattatgaaaattactgttccagcaacatctgccaatattggtccaggttttgattctgtgggtgttgccgtttctaaatatttgacaatcgaggtgcttgaaccagcagatgcatggcatatcgaacatgatttgggagatattccttcagatgaaaacaacctcctcatttcaacagccttgcaagtgaagtctgatttgcaaccccataaattggtgatgacatcagatattcccttggcgcgtggcctaggttcttcaagttctgttattgttgcaggaatcgagttggccaatcagttggcagatttgcagctgtcagacgatgataaacttgatattgcgaccaagattgaaggtcacccggacaatgttgctccagctatttttgggaatcttgttgtggcatcttatgtggacgaacatgttaatagcatcgttacagattttccagagtgtgcctttgtagccttcattccgagctatgaactcaagacgtctgattcacgtggggttcttccaagtgacttgtcttacaaagaagctgtagctgcatcatctattgccaacgttgccattgctgccctctttgcaggtgatttggttaaggcaggacgtgctatccaaggagacatgttccacgaacgctatcgtcaaaaactggttaaagaatttgcgactattaaggaactgtcaggccaatatggtgcctacgctacctatctctcaggtgctggcccaacagttatgaccttgacgccaaatgaccaggctgaggctcttaaaacggaaattgatggtcttggtttagatggtgaaactttcatcttatctgtggataaagcaggtgttgtcgttgactagaaaaaatcaagggctactctttggtctagcaacctatattcaatggggatttttatcccttttttggaagcttctagcaggtgtttcggcttacaacaccttctcatggcggattgtttttactgtagtgacgatgttggtctatgccctagttgctaagcaaaatacacgttttaaagaggagcttgtagaactttggcaagataagaaagccttgcttcgtatgctacttgccagctttctcatagcagctaactggttgatttatatctatgctgtgggtcatgggcaagcgacgcaggctagcctgggttattacattatgcctattgtttctatcctgtttgcccttatttttcttcgtgaatctctaagcagaaccatgtaggcagcagtagtattggcttttataggagtcttagttcttgttgccaatacaggaaaacttcccatggtttctttgggattggccctgagctttggtttctatggtttaatcaaaaaaggggttaggctctccagtgacgtagccatgttagtagaaagtggattgctactaccttttgtagctatctatctcattttcttttctccagaatcattttcttcctattcgagcatggaaatgtttctcctagccatctcaggtgtggtgaccgctgttcccttgctttgcttctcggaagcagtcaaaagggcaccgcttaaccttatcggatttatccaatacctcaatcctaccattcaacttctcgtagctattctcatttttggtgagacggtcagctttggagaattgaaaggcttcctctttatatggatagccatcctagtctttgtaactggccaaatagtaacatttcgtagaagttcctgatagctatcgggaactttttatgatgtcgtcctaaaaatgagccaagtttatctgacaattttagaactttaagatataatagtagtattagattaaaatagcggagaattttatgcgaaaaatgaaaaagctagtgggctatctgattctgctcgctatcccagttgccatcgctgcaggtctgtttatctttaacggttcaggttaccgtttgtcagaaaaagatgcagcagacattgcttacaaaaatgcaggtgtcaaaacttctgagatctctcaatcaacagtttcaaaagcacgttctgggcttcacggaagttatgagattagtttcacaacgtcagacaaccattttgagtatacgattgacggtcagtcaggatctattttgaaacataagagtgatcatccaacatctaaggatgaggatgatactcaaaaaagtgaagatcctaaagacgagactcaacctagtgaaagcaaggaagagacagcagtatctaaagaagctgcgcaaacaacagctcttaaccatgctggtctagctgagggttctgtgacaaacttgaaaacggatttgaagactgaaggagacggtaaagtctacaatatcagctttgattatgcggctagtggtctacgttataaatacgcggtaaatgctgattcgggagctatcgtagcctatacgactgagtatctcacaggggctgcgactcctgctcagtaggtcgcagatagagtgaaagctctccttatcattgaggaaaatccttgcaatttctctgaaatggtgtaaacttaaagtgaaagcggtaacagtagttgtaaaagttgccgtagaatcaaggaggctttgaccatgaaagaattccaagcatttaaagacacgcttagcaataaggctctcaaagccatttacgaagaaagtaaattggaagttcaagatgaaacaaccgaaggtacagaagccttctcactagccttggcaacccaaatggctatcaatctacttgaaagctatgaaaaatggctaaaagaagaaagagctaaggaagaaaaataagatgcaatccttgtcggcagacagggatttttcttatgaaaataaaaaatgaagcattgtatttctgtttcaaggtggaatctgtagtctgatttattgtgataacatcttccccacaatttcatttgtcttgagattaaaaatgtgatagaataagaccattcagaggtgctttgaagcccatttgtcacaggaagcggtggtactgagaaatccgcacaaatgtcaaagctggttgctgatggtcaaattgaatcaagaaagctgtgagtggtttccactcaaaattgggtggtaccgcggatacacattcgtccctgtcatagttatggcagggactttctatatcttttaaagaatcaagcccgaaggtcgcaggtgaatttagagatattgatgcagacggagcgaaagcgaggtctacgttcctaccaaaggagggtgacatgaagcaatcttttgagaccagtaaattgtactatggttttcccatttttatcttgggttaccaggaccagacacatggttataatgtgacgacttgtagttcttcctatagtctaggtgattggcttgttattggagtcggtagcgaggaaaatgcggcagaccagattaaacattatcagaagttcacagtgaatatacctgatgagagtttcatgctggagatggaacaggctggttttattagccatcgagaaaagattgctaaacttggcctagatttccaaccttctaaactgacacaagcacctattttggatgcttgtccagtcgttctggattgccaggtggatcgaattattgaggaagatggtatctgtcatatctttgctaagattctagaccgtctggctgaatctgatttgttggatgacaagggccattttaaaaatgatcgctttgcaccgacttactttatgggggacggccataagcgtgtctatcgctatctagatgaccgagtcgaccccatgggaagcttcatcaagaaagcgaggaagaaggatgacaaaagctgaattgccagaacgaatcgaaacgaagcgtctggtcttacgagttcgaacagtggcggatgtagaggatatttatgcctacgctagtctcccagaagtttcttacccagcaggctttccacccgttaagaccttggaagatgagatttattatctagagcatatccttcctgagcgtaatcaaaaagacaatcttccagcaggctatggaatcgtggtcaaagggaccgataaagtgatcggttctgttgatttcaaccatagacacgaagatgatgtgcttgaaattggctataccttgcacccagactattgggggcgaggctatgtgccagaagcagcacgtgccttgattgatttagcttttaaagaattgaacctacacaagatagaattgtcttgctttggttacaaccttcaaagtcgacgagtcgctgagaaacttggcttcacccttgaagctcgtatccgtgaccgtaaagatgcccaaggcaatcgttgtgatgatttgagatacggcttgctgaagagtgaatgggagaatttaaactgttagttgaactgttcgagaaaagcgaacagttggggaaaagaaaaaaagagagaatgaattatctatttatggacgaaaaaggtccacaaaattcttttaaaattacacagccatttgataaacaaaacaaattatcttatgctaacgataatatgcattcctatgttgctaatgtgattcaaattgataaagtagtctatgagttaattgaacaggagtataatcaaattgttgaaacttatttatcaagcagaaaacaactttggcaatcattaaaaaataagaataaagaacttaaaggtttagatttgttgaaatcaaactttgagtatggaattgcttctatgaaaaataatgaagttcagttttatttagccatctttaagatgctaaacaaattcgaagttgataatttattgtttatgattagcaaaatgtcgattattacctcatcaagattaactaacttcttttattttttagatgaagagacagatttttcaccgtttattgctaaatatgttttaaccaaatatgctgaaattgaggcttcaaaaaaagttattgaagctttattggataaaacattgccaacaagacctttgttgaaactaataaagcaggatttgaataggataattaataataatcaaggaaatatgaggatggctcggcaattagtcatttaccaacaactcattatttcaatggatagggtaattaatgaccataaaattaagttgtttgaaccggaattaaaactatctttcgattggaataaggtaaagtgggcatttgatttgtggatgactgagcaaagatatcctgatgataacattgaatggatccttttcttagatgaaggaatacctagtgacatatttagtagtttaaagataaataaaattgaagagtcttgtaattctagagactatgtcggattacaaataacagatatgattgttgttttgattggaaagctggtttcacaaataacagcaaacactaggtatgattttaataaacctgataagagggtattattaaataagaaatattttgatttaaatgaacaacaatataacttaattacagagttgaataaatttcttttagataaaaaaacaaattatcattttgttaatgatgcttattttgacgaatctttgttaattcaagtttatattagttacattgcttcgtttgataattttgagcagtataagtcagttgatttaagtgaccatgttgagcgctatttccttaattttgctaagaaatctgaagaaaaatattatgaaggaatgaaacatgaactaatgacaagagtttgttttagcagtttaaaaaaaggaatagaagaaggtctagttaggccgttataaaaagataggagaacacacatgtctaaagaactttcacctaaatacaatccagccgaggttgaggctggtcgttaccaaaaatggcttgatgaggatgttttcaagccttcaggcgataaaaaggctaagccttattcaatcgtcattccaccaccaaacgtaactggtaaacttcaccttggtcacgcttgggatacaactttgcaagatatcattatccgccaaaaacgtatgcaaggtttcgatacactttggcttccaggtatggaccacgcaggtattgctactcaagccaaggttgaagcgcgtttggctgaagacggcatctctcgttatgaccttggtcgtgaaaaattcctcgataaggtttgggaatggaaagacgaatatgcgacgactatcaaggaacaatggggcaagatggggctttctgtagactattctcgtgagcgtttcacccttgatgaagggttgtcaaaagctgttcgtaaggtctttgtagagctctacaagaagggctggatttaccgtggtgaatttatcatcaactgggatccaaaagctcgtacagccctttctgatatcgaggttattcacaaggatgtggagggtgccttctaccacatgaactatatgttggaagatggttcacgtgcccttgaagtggcaacaacacgtcctgaaaccatgtttggggatacagccgtagcggttaacccaaatgatgaccgttataaagatttgattggtaaaaatgttatcttgccaatcttgaacaagccaatcccaatcgttggggacgaacacgcagaccctgaatttggtactggtgtggtgaaaatcactcctgcccacgaccctaatgacttcttggttggtcaacgtcataatcttcctcaagtcaacgttatgaacgatgatggtaccatgaatgaattggctggtgaattcaatggcatggaccgctttgaagctcgtaaggctgttatcaagaagttagaagaaatcggtgcgcttgttaagattgagaagatgacccactcagttggtcactcagagcgtactggagttatggttgagccacgcttgtctacacaatggtttgtgaagatggaccaattggctaaaaatgctattgccaaccaagatacagaggacaaggtagaattctacccacctcgtttcaatgataccttccttcaatggatggaaaatgtccacgattgggttatttctcgtcagctctggtggggtcaccaaatccctgcctggtacaatgctgagggtgaaatgtacgtcggcgaagaagcaccagaaggcgacggatggaaacaagacgaagatgtcttggatacttggttcagttctgccctctggccattctcaactatgggctggccggatgtcgactcagaagacttcaaacgttacttcccaacttcaaccttggttacaggttacgacatcatcttcttctgggtatctcgtatgatcttccaatcattggaattcacaggacgccaaccattccaaaacgttctgattcacggtctcattcgtgacgagcaaggacgcaagatgtctaagtcactcggtaacgggattgacccaatggatgttattgagaaatacggtgctgatgcccttcgttggttcctttcaaacggttctgcaccaggtcaagacgtgcgtttctcttatgagaaaatggatgcgtcttggaacttcattaacaagatttggaacatctctcgctatatccttatgaacaatgaaggattgaccttggatgtagcacgtgaaaatgtggctaaagtcgctgctagtcaagcaggtaacgtgacagaccgttggattctccacaacctcaacgaaactattggaaaagttactgaaaactttgacaagtttgaattcggtgtggctggtcacatcctctacaacttcatctgggatgagtttgcggactggtatgttgagttgactaaggaagtgctatacagcgacaatgaggacgaaaaagtcatcactcgttcggttcttctttacaccttggatcaaatcttgcgtctccttcacccaatcatgccattcgtgactgaggaaatctacggtcaaatctctgaaggaacaatcgtgactgcggaatacccagtggttcgtccagagtttgaaaacgaagcagcagcagccggcgttgaagctcttaaagatgtgattcgctccgttcgtaactcacgtgcagaagtgaacgtagcgccaagtaaaccaatcactatcttgatcaagacaaacgacagcaagctcgatgctttctttaatgataatgtcaactacatcaaacgcttcacaaacccagaacacttggaaattgcagcagatgtcgaagtgcctgacttggttatgtcaagcatcatcacaggcgcagaaatctacttgccacttgctgaccttcttaatgttgaagaagaattggctcgtcttgaaaaagaattagccaaatggcaaaaagaactggatatggttggtaagaagctctctaacgaacgcttcgtagccaacgccaaaccagaagtcgtccaaaaagaacgcgacaaacaagccgactaccaagcgaaatacgacgcgactgttgcacgtattgatgagatgaagaagttggtgaaataaacctagaaacacggcggtatgccgtgtttttttggtataatagacataataattatgaacagagatataaggtgatggagaaacaaaattttttaaagaaaaacggcatctactacactaataaattattagcaaaaaatatgattgattatttagatattgactatacaaaagagttcacaataattgagcctgctgttggagagggacatattttttgtttaattgttgaagagtttctcaaaaagaatcaaaataaatgccgagaaaaaataaaaaaggatttggaaagtaacttttctgcgtttgatattagagaagacgctattaaactatgtatttcaagactcgatagattggttagtaaatattacaatgatttatcagtaaattggaatgtttatgtttttgatgcgttagattattatcaaaaatttgataaacaaaaaaaatacgattatgttattagtaatcccccatatatttcaagaaaaaatatggacaaatatatggttgataaactcaagaaacatagcgaattctgtaatcgatttaactttgatatctattattatttctttgagttaggactatctctctggaataaaaaaggaaaaataagttatattactccaaataattatttgagagctagaggtgctgaaacactacttcagacattaatctctaataaatacattgaaaaaataattgattatggtgatttattgaattttgaagatgcaacaacatatacagcaatcacggttatttctaatgaaaatgctaatttagagattgtaagttcaaataaaactaagttaaagagttattcatatgatgaactgcttaacaaagaaatttattatttatatgatgaaaaatttatatatgaaggaggagactccgtcttattgggagaaatagcagatataaaaaatggcttagccaccttacaagatagtgtatttattattgctgaagaagagattgttgatgatttggaagatcagtatgttatagaaaaaaaatctagacagtatcttattgagaaagctattttaaaaaagggagtacgggtttctaatcttaatagaaaatattatataatttttccctatgatgacagaaatcagaaaataattacaattagtaaaagttatccatgtacttatgactatttaagaaatgaattaaatgattcttttcaagaaaagtatggtatttattttggtcggactcagggaatgctgaattattattctcaaaaaattataataccgaaggttgctaatttagaagatgtcccatttaaacaaattaattttggctttgtattggctgggatttcaattgtatttttaaaagatttgagagagtcaacttacaatgaaattctaaaatatttaaattcaaaacttgtagttgattatttaaaaagaatatctaagaattattcatcaggatacaaaaatataagcactaacgatctaaaaaaaattagaatcccaaaaaagttatttgatgaggagtaaaaaatgggtgataaacttaactatatcgttgaagataatattattgcagaggttttaggtagaaataatttctcaacaaaagaatctgctattttagaattaataaaaaatgcttatgatgctggatctaataagttaaacttgatttttaaaaaatctgagaatactgggcgcttaatgcttgaaataatagatgatggttctggaatgaatgaaaatgatattaggcaagcctggatgcatgttggtaaaagtaccagagattataaagattctgataccggacggatttttgctggatcaaaagggattggaagatttgctttagctagattaggtgagtcagttgatatgttcactaaaaagaaaaatgatgttggttatcactggcaaaccaattggaatagttcagagattgatattgattataatatagctagtcaaggaactaaaattcaaataaatgaattaagagataaatggtcatcaaaaagtattaaaccgttaaaaaactatataagtaagacttatagagatagtaaaatgaaaatttctataatatttttagtagaaaatggagaaagtttagaggaggaaactgagttaatttggacaaatcccaaaattggggaaaattatcttgaatctattacaataaattatgattctaaaaataagaaactgtatggtcaagtgcttttagacgagttcaatgattctgtctggaaaatgacaaataaaaatataaaagagtatcattttgaacaaaatatggttgatgagttaaaaaaagaaatctccaaattaataattgaagaagaagacgttgataaaaaagatataacagacgaaatgattgcagaattattaaaagaagtgggttcgttcaaaggtgaattatattttagtttgaataatgttactcaagtggataaagaaaaatatgaatataaacatgatactttatcaaacagatttaaggggggagtaattttatatagaaatgcttttagtatagattcttttgaaggtagaacagactggttagaacttggaaaacgttcatcttcttcaccagctgcggcttcacatccaacaggttcttggagagttcgtcgaaatcaattatctggctacattataattgataaggaagaaaatgcctgtattgaagatatttcaaataggcagggaattgttcaaaatattcattttaaaattttaaagaaaatcgttgttagtgctttagaggaatttgaagcttatagacagtctataattagagatatcaaaaaaataaaagataaagaggattcaacatcagtcataaaagaagttgatatcgaaaataaaattgatagttttattgatcacagtaggtctatcgaagaattaactattcaagatttagttgaagtgagaaatagacttttagagtataaaaataaatttgatgatattatgtatgaaaagttagaagttgaagaaaattatcgctatgaggcacagttgttaaatgttcttgctactgttcaactaaaaataagttcattaagtcatgaattacacaataatagaaacacaattgctgtaaatcctcaaaaaattgaagatatcttaagaagaaaatataattgggaagagcttaagtctgaagttccaagtagtaggaatattccgtcgttattgaaaaatctaaaaaaagacttagaaaaagttttggatctctctgacactattatagacgagaataaaaaagaaagatttgagccacgagaatatagcttagaagttcttgtagaggagatagtcgaaaaatggaaaactcagtataattgggttcactttaaaactaattttaccggtgaagatatcataataatatcgtacgattatttaatgattatactcgataacttaattcttaatagtgtgcaggtgaatgaatgtagaaaagagttagaaatatcggttgattttgattacaataaaggaaaattactacttgaatactctgacaatggtgaagggcttgataaaaaatataaaaataatccatcaaaaatattaaatgttcacgaaggcactagagaagatgggcatggtttagggatgtggatggtaaataacacagtctataagcttaatggcaatattagtattgatggagaaacaaaagggtttaatttaaaagcggaaatgaacatataaaaattactagtgagggtatgatatgaaacataagattaaattaatatatgtggatgataaactagatccgttactagttgaatatctatatgattttagaaaagatgacaccataatcgcttataatgaaatagaatttgatagtagtagtagagactatgaatcattattgactgacaacagagttttagaatctgatatcattgtgattgattctaagttatttgagaatgaatatgcagaatcgggttcaaaatttactggtcaagaatttaaattagttttaagaattttaaatccttttataaaagtaattgtaataactcaaaataaggatttagaaaattatggggttttaaataaatttgctacttctaaaggtaagggttctcaagaaaatgctaatgatttttataataaatccttaaaacctgcgatggaagaagcaataaaagaaatagtagagatgagaagaattggaaaggagttagaattaaacaaaggtgcttatgagggatcattgattgttgaaaaaacacaaaatttacttaataaaataacatcgtatagagaactgacagacgaaaaaatcgatgagctaatagatattataaagcaagaagttttggaggatagggatgagtgattaccgatttgtgggagaagaagaagctaacgttaaaaaaattattcaagaaaaaaatctattagcaaaaaaaatcgataaacgaacaataaaagatgacaatcgggggaaacattacgataaaatcaaaaataaatgttccaattattatgagacttttcaagaaatttatcatcaaaaatgtggctactgcggtgtctcagtctctataaattcagctcctcaatatgagttagatcattttattaatgaattacagaaaacatctccaaatggaaaatctgtagatcacatcgaaaatcttatatttgcttgtcgaaattgcaatcaggcaaaaaaagaatttgatacaaaaaagattattggtatagtgcaccctgatggggaaaatataaaaaaagtctttgaacgagataactattataaaatagttatctctcaagaatatttaaataatgagcaggtgaaatcattctatagtaaaatgaaatttgactacgcatataggaagttagattatctattgttgaatctttattttactaaaaataataaaaaagatagaatttataatagattattagagcttagaaatagttttccaagtttgaataaattacaataatcttttagaaaaaggcgattacatgacaaattctgtgagtttgaaccactctgagaagtaaaagattgctaccgtcttctcagctttttgggaaattgaattggaatttgaacagaccaatgagttcagagtggtgtatgtaatgagtttgataagtatgtgtgtcagacttatcagttaaacaattcagttatccccttcagctttctttaagcaacccaagctatactaaagccatcctaattaagtattgctgaacttggttcagtagcgctcacatgttctggttttaagtcagacagtgtatctttcttttttcataaatctcccaaacaagtctaatctcacaaggttaggcttgtttttatgaaataagcagaaagtttttcattaaaagtaaacgcttgtgtaagtaaaatgaaaacgttaggcaaagtcagtgaaaacgtctaaaaaaccgtcaattcattgactttcgtggaaaataggactaaaataacagggtaaaaataattaaaaaggagaattctactatgaatctaactatcttagccctcggtttggccgttatgggtgtatctcttggtgagggtatcctcgttgccaatatcgctaaagctgcagctcgccaacctgagatgtttagcaaacttcaaacattgatgtttactggtgttgcctttatcgaaggtaccttcttcgtattgtttgcccttagctacattgtctaatagacaaataaaagatgaaggagggatgagcagtggaaactacaagtaatccaaccgtctcattatttgggattgattttgacttgactatccttgccatgtctctcttgacagtaattatcgtttttggagtggttttttggtcaagtcgtaagatgaccattaaaccaaagggaaaacaaaatgtgcttgagttcatctatgagtttgtgaatagtaccatttctcaaagtcttgggaaattcacgaagaattatagtttgctcttgtttgtaattttcacctttgtttttacagcaaacaacttaggtttgcttgtgtctgtaaaaagtgagcattacaatttttggacttctccaacatcgaacttcggtgttactatcactctttctttgattattaccctcattagtcatattgaggggatccgtaaaaaagggtttaaaggctatctaaagggctacctttcaccatacccagctatgctcccaatgaacattttggaacaattaaccaaccctgcttcattggccttgcgtttgtttggtaacatttattctggtgaggtacttactggcttgattcttcaattggtgacctggtctgcttttgcagcacctgtatcctttgctttgaaccttgtctgggttgccttttcagcctttatcggctttatccaagcctatgtctttattatcctaagttcaaactatattggtgataaagtcaacgaagaataattaagaaagggagaaatgaaatgtcaatacttattaatagtacgacacttggtaatatcattatcacactcggctcagtttttctcttgtattacctcatccgtaaattcgcatgggatcaaattacaggaatctttgctgctcgtgaaaagaaaattgccacagatattgatagtgctgaaaatgctcgtcaagaagcagaaagcttggcacaaaaacgtcaagatgagttggcaggtgctcgcactgaggcagctcaaattattgatggggccaaggaaactggtaaaactcaagaatctaaaatcattgcagaagcacatgatgaagctaaacgcttgaaagaaaaagccaatcaagacatcgcccaaagccgtgtggaagcacttgctggcgttaaaggtgaagttgcagacttaactgtcctcttggcggaaaaagttatgaaacaaaaccttgatgctaaagcgcaatctgacttgattgatagctatcttgatcaattaggagatgcttaatggataagaaaacacaagctcttgttgagcagtatgccagaagcctggtagaagtcgcttttgaacaagacgccgtgtcaacaatccaagaagaagtaaggcaaatcctaacagttttttctgaaacaaatctaaaaaacttcttgtcgcaggaaaatgtgacaagtgaagctaaaaaagaaagtttgagcttgtttcaagagtcttgttcagtgtatatgaacaattttcttgaggtaatcttactcaatgaccgtgccaacattctctatgatgtgttgaaattggtccttgagctctttgatcaagaagacaatacttacgatgttacagtgacatcagcaagtcccttgtctgaggaacaaaaagcccgacttttggcgattgtttcacaaaaatttgagattaagacacgtcgtttagtagaaaaaattgatgaggacctcatcggaggattcgtcatcaaagcaaaaaataaggttgttgacacgtcaattcgcagtcaattgcaaacctttaaaacgaatttgaaatagaaagtggtgtgacttttggcaattaacgcacaagaaattagcgctttaattaaaaagcaaattgaaaacttccagccaaactttgacgtcactgaaactggtgtcgttacctatatcggtgacggtatcgcacgtgctcgtggtcttgataacgccatgagtggtgagttgctcgaatttgaaaatggtgcctatggtatggcccaaaaccttgaaactaatgatgtcggtatcattatcttgggggatttcgtagcaattcgtgaaggcgatattgttaaacgtactggaaaaatcatggaagttccagttggtgaagcccttattggtcgtgtagtaaacccacttgggcaaccagttgatggtcttggtgacatcgaaacaacaggtttccgtccagttgaaacacctgctccaggtgttatgcaacgtaaatcagtttctgagccattacaaactggtcttaaggccattgatgccttggttccaattggacgtggtcaacgtgagttgatcatcggagaccgccaaactggtaaaacttcagtagccattgatgcgatcttgaaccaaaaaggtcaagatatgatctgtatctatgtggctattggtcaaaaagaatcaacagttcgtacacaagtagaaactctccgtaaacatggtgctcttgattacacaatcgttgtgactgcctcagcatcacaaccatcaccattgctttacatcgcgccttacgctggtgttgcaatggctgaagagttcatgtataacggaaaacacgtcttgattgtttatgatgatttgtctaaacaagccgtggcctaccgtgaactttcattgcttctccgtcgtccaccaggtcgtgaagcctacccaggggatgtcttctatctccactcacgtcttttggaacgttcagctaaagtttcagatgatcttggtggtggttcaattactgccttgccaatcatccaaacgcaagccggagatatctcagcttatatcgcaacaaacgttatctcaatcacagatggacaaatcttcttgcaagaaaacttgtttaactcaggtattcgtccagccattgatgcgggttcttccgtatcacgtgtaggtggatcagcgcaaattaaagcgatgaagaaggttgctggtacacttcgtcttgacttggcttcatatcgtgaacttgaagcctttacgcaatttggttcagatttggatgctgcgactcaagcgaaattgaaccgtggtcgtcgtacaatcgaagttttgaaacaaccgcttcataaaccacttccagttgagaaacaagttgttatactttacgctttgacacacggtttcttggatagtgttccggttgatcaaatcttggattttgaagaagcactctatgactactttgatagtcaccatgaggatatctttgaaactattcgtacaactaaggatattcctgaggaatctgtacttaatgaagctatccaagctttcaaagatcagtcagaatacaaatagaaatagggaggacagcatatggcaggctctctaagagaaatccaagcaaaaattgcttcaactaagaaaacgagtcaaatcacaggagccatgcaaatggtttctgcctcaaaattgacacgttctgagcaagctgctaaagatttccaaatctatgcctcaaaaattagacagatcacaacagatcttctacattcagaattaattaatggttcgtcaaatccaatgttggatgcacgtccagttcgtaagacaggttacattgtcattacttcagataaaggacttgttgggggttataactcaacaattcttaaagctgtgttggacatgattaaacgtgaccatgattctgaagatgaatatgctatcatttctattggtggaacaggttcagatttcttcaaggctcgtaacatgaatgttgcttttgaacttcgtggccttgaagatcaacctagttttgatcaagtcggaaaaatcatttctaaagctgtaggaatgtatcaaaatgaactttttgatgaactctatgtgtgctataaccaccatgttaacagtttgtctagcgaagttcgtgtggaacaaatgcttcctatcgctgatttggatcccaatgaatcagaaggtcatgtgttgaccaagtttgaattggaaccagatcgtgacactattttggatcaactcttaccacaatatgcggagagtcttatctacggtgctatcgtagatgccaaaacagctgagcacgcagcgggtatgactgcaatgcagacagccactgataatgctaagaatgtgattaacgatttgacaatccaatataaccgtgcgcgtcaagctgccatcactcaggaaattactgaaattgttggtggtgcaagtgcacttgaatagcagagatttgtcttaattagacacacatgaaaaagggatgattgtcatccaaaaaactatcataaggagaaaacaatgagctcaggcaaaattgctcaggttgttggtcctgttgtagacgtagcgtttgcagctggtgataaactccctgagattaacaatgcattggtcgtttatactgacgaacaaaagtctaaacgtatcgtgctcgaagtagctcttgaacttggagaaggtgtggttcgtaccattgccatggaatctactgatggattgactcgtggactagaagttctggacactggtcgtccaatcagcgttcctgttggtaaagatacccttggacgtgtctttaacgttcttggtgataccattgacttggaagcaccttttgcagaagatgcagagcgtgaaccaattcacaaaaaagcaccaactttcgatgaattgtcaacatctactgaaatccttgaaacggggattaaagttatcgacttgcttgccccttaccttaaaggtggtaaagtcggactctttggtggtgccggtgttggtaaaaccgttcttattcaagagttgattcacaacattgcccaagagcacggtggtatttccgtgtttacaggtgttggtgaacgtacacgtgaaggtaatgacctttactgggaaatgaaagaatctggcgttattgagaaaacagccatggtcttcggtcaaatgaacgaaccacctggagcacgtatgcgtgttgctcttactggtttgacaattgcggaatacttccgtgatgtcgaaggtcaagacgtgcttctcttcatcgataatatcttccgtttcactcaagcgggttctgaggtttctgcccttcttggtcgtatgccatcagccgttggttaccaacctacacttgctactgaaatgggtcaattgcaagaacgtatcacatcaactaaaaaaggttctgttacatcaatccaagctatctacgttccagccgatgactatactgacccagcgccagctacagcatttgctcacttggattcaacaaccaaccttgaacgtaagttgacacaaatgggtatttacccagccgttgacccattggcatcaagctcacgtgccctttcacctgaaattgttggtgaagaacactatgctgttgcgactgaagttcaacgtgtgcttcaacgttaccgtgaattgcaagatattatcgctatccttggtatggatgaattgtcagacgaagaaaaaacattggttggacgtgctcgtcgtatccaattcttcttgtcacaaaactttaacgttgctgaacagtttacaggtcaaccaggttcttatgttccagttgctgaaaccgttcgtagctttaaagaaatccttgaaggtaaatatgacaatcttccagaagatgccttccgtagcgtaggtccaattgaggatgtagtagctaaagctaaagctatgggctactaatgaggtgaagatatggcacaaatgaccgtacaagtggtaactccggatggtctgaaatatgaccaccatgccagctttatccacgcggttactaaagatggtcaaattggtatcttgccaggccatattaacttgattgcgccacttgaagtggatgaactcaaggttcgtcgtgtggatgacgagagtcacgtcgattggattgccgtaaacggtggtatcatcgaagttaaagatgattttattactatcgttgccgattcagcagaacgtgaacgcgacattgacgtttctcgtgccgaacgtgccaagcaacgtgccgaacgtgacttggaagaagcaactaaatctgaccgtattgatgaagttcaacgtgctcaggttgctctccgtcgagcacttaatcgtatcagtgtcggtacaaaataagacaaaaaaaacgagactttggtcccgttttttatttgtcgtaaaagaaaacatgagaagtagcaaagttatcaaagaaagttcattgtaaaacctatctgaaggtaagataaaaaatcagatttccagtcctgaaaacggttaatttagcttttactttagtttaaggtatcaaagtgttataatataagctgttagctttatattttaagagaaaatgtagagtaacgtaatagaaagtatgagttttttaaagatatgaaaattgaaaagaagcatcttttagattacaccatcttgataccttatttaatcttatccatagttggtttaatagtagtgtattcaacaacaagtgctcgtttagtagccttgggagccaatcccttcgcatctgttataaaccaaggagccttttggttggtatccttgttctctatttttttcatctaccgactgaaattgaactttctcaggaaagataagcttttgggtgttgttattgcctttgagattttacttttggtcattgccaaatttttcaccagggaaatcaatggtgccaatggttggattgtgctaggtcccttgtctttccaaccagcggagtaccttaagatcattgttgtttggtttttggcacacaccttttcaaaaaaacagtctgccatagaacgttatgactaccaagccctgacgaagaatagatggattcctaggaatggtaaggaacttaatgactggcgtgtctatttgcttgtaatgatcggtttggttgctatccaacctgacttggggaatgcggctatcattgtgttgactacagtagtgatgttttcaatttctggtgttggctaccgttggtttacggccttgtttgccagtattgttgggatttcgtcagccttccttgggttaattgccttggttggggttcaaaccatggctaaggtacctatctttggatatgttgccaagcgtttcgcagcatattttaatccgttcaaggatttgacaggatctggtcttcagctatctcattcatactatgctatgagtaatgggggctggttcggccttggacttggaaattcgattgaaaaaactggttatctcccagaagctacaacagactttgtgttttcaattgtaattgaagagttaggtcttatcggagctggcttgattctggccctcctctttttcctcattcttcgtgttatgattgtgggagtcaaggcacgaaatccttttaactctatgatggcattgggtgtaggtgccttaatgctaatgcaggtcttcgttaacatcggaggaatctcagggctgattccatcaacaggggttaccttccccttcctttcgcaaggaggtaactctcttttagtgacttcagttgggatagcctttgtcttgaacatcgctgctaatgaaaagcgtgataatattgttcaagcgattgaggatgagttatctcagactcaagaattggaaaatcaagatgaaaaaatcgtgcctttaagaagaagtcgttaatacggcttcttttttcgttagatggtgttaggcagtagtatgaagatagtgaaagctaataggagcagtagaaatagaattattgaaaggaatatttgtaattactctaaagaaaaactgaaaactatataaaatacttgcaattctatgacattttgatagaatagtagagtaaagttagactgtattgcctactgtctatctataaaatatattttattggaggcttttcctaaatggcaaaagaaaaatacgatcgtagtaaaccacacgttaacattggtacaatcggacacgttgaccacggtaaaactactttgacagctgctatcacaactgtattggctcgtcgtcttcctagcgcagttaacacaccaaaagactacgcttcaatcgacgctgctccagaagaacgtgaacgtggtatcacaatcaacactgcacacgttgagtacgaaactgaaaaacgtcactacgctcacatcgatgcgccaggacacgcggactacgttaaaaacatgatcactggtgccgctcaaatggacggtgcgatccttgtagtagcatctactgacggaccaatgccacaaactcgtgagcacatccttctttcacgtcaggttggtgttaaacaccttatcgtcttcatgaacaaagttgacttggttgacgatgaagaattgcttgaattggttgaaatggaaatccgtgaccttctttcagaatacgatttcccaggtgatgacattccagttatccaaggttcagctcttaaagctcttgaaggtgattctaaatacgaagacatcatcatggacttgatgaacactgttgacgaatacattccagaaccagaacgtgacactgacaaaccattgttgcttccagtcgaagacgtattctcaatcactggtcgtggtactgttgcttcaggacgtatcgaccgtggtgttgttcgtgtcaatgacgaagttgaaatcgttggtcttaaagaagacatccaaaaagcagttgttactggtgttgaaatgttccgtaaacaacttgacgaaggtattgccggagataacgtcggtgttcttcttcgtggtatccaacgtgatgaaatcgaacgtggtcaagtattggctgcacctggttcaatcaacccacacactaaattcaaaggtgaagtttacatcctttctaaagaagaaggtggacgtcacactccattcttcaacaactaccgtccacagttctacttccgtacaactgacgtaacaggttcaatcgaacttcctgcaggtactgaaatggttatgcctggtgataacgtgactatcgacgttgagttgatccacccaatcgccgttgaacaaggtacaacattctctatccgtgaaggtggacgtactgttggttcaggtatcgtatctgaaatcgaagcttaattaatattaagttcccaatacaattattcgtcagacaataattgagagagtcgagtttactcggctctttttggcgtttaaaaatactcgtaatattatatttttgacgtgttttagatgcttaatctaagttttgatagtgataaatacacataaagcaggctgagttttcggaattttcctaaaatcctagtaatagtaagggatttgtgataaaataaacgagtaaataaataaaagaagaggtatgtgaaatgtcacgtaaaccatttatcgctggtaactggaaaatgaacaaaaatccagaagaagcaaaagcattcgttgaagctgtagcatcaaaacttccttcatcagatcttgttgaagctggtatcgcagctcctgcagttgacttgacagctgtacttgctgctgctaaaggttcagaccttaaagttgctgcacaaaacacttactttgaaaatgctggtgccttcactggtgaaactagcccacaagttttgaaagaaatcggtactgactacgttgttatcggtcactcagaacgtcgtgactacttccacgaaactgatgaagacatcaacaaaaaagctaaagcaatctttgctaatggtatgcttccaatcatctgttgtggtgaatcacttgaaacttacgaagctggtaaagcagcagaattcgtaggtgctcaagtttcagctgctcttgctggattgactgcagaacaagtagcttcaacagtaatcgcctacgaaccaatctgggctatcggtactggtaaatcagcttcacaagacgacgcacaaaaaatgtgtaaagttgttcgtgacgttgtagctgctgactttggtcaagaagttgctgacaaagtacgtgttcaatacggtggatcagttaaacctgaaaacgttgctgaatacatggcttgtccagacgttgacggagctcttgttggtggtgcatcacttgaagctgaaagcttcttggcattgcttgacttcgttaaataatgtataaaaagtcgaggtttcctcggcttttttcttgtttgtcttaagtgtttttctaaaaaaagccaggtttctcttatcctgttttggggagcaaaggtgcttaaatgtagaacaaaaactcctattttgtaagccctatctttttgtttggattttttaaaactttgagcctccacaagtacaattgggttgtcccaagaggcagataatatgctataatgagagtagtataactagagcgcaggcactgatagtctgtatgctccgcatttttccaagaagaggagaattagaaatcatgacttttgatgcaattgaccaaatggcggtcagcactattcgttcgctttcgatcgaggccattcaagccgcgaattctggacacccaggtcttcctatgggtgcagcgccaatggcatatgtactttggaaccatgtgatgaatgttaatccaaagactagccgtaactggacaaaccgtgaccgttttgttctttctgcaggtcatggttctgctttgctttatagtctcttgcacctttcaggctatgatgtatcaatggatgatttgaagaacttccgtcaatggggttctaagactccgggtcaccctgaagttgatcatactgatggtgttgaagcaacatcaggtcctcttggtcaaggaattgctaatgcagtaggtatggcaatggctgaagcacatttggctgctaaatttaacaaacctggttttgatattgttgaccattatacttatgccctccatggagatggttgtttgatggaaggtgtttctcaagaagccgctagtcttgctggtcaccttaaacttggtaagttggttcttctttacgattcaaacgatatttcgcttgatggaccaacatcaatggctttcactgaggatgttaaggctaagtttgaagcttatggttggcaacacatccttgttaaagatggtaatgatttggaagctattgctaaagctatcgaagaagctaaagctgagacagataaaccatctattatcgaagttaagacaatcattggttacggagctgaaggacaaggaacatcagctgtccacggtgctccaattggtcaagacggcattgatcacgcaaaaagtgtttacggttacgatgcaccggcatttacagttccagatgaagttgctcgtcgttttgaagttggtattaaattccgtggtgaagctgctgaaaatgcttggcaaactaaatttgcagaatatgaatctgcttacccagaattggctgctgaatacaaggctgcctttgcaaatgaacctgtacacgttgacttgaatgctcatgaattgggttcagcagtagctagccgtgtgtcaagccaacaagctatccaacagatttctgaacaagttccttcattctggggaggttcagcagacctttcagcttctaacaatactatggttaaggctgagtctgatttccaaccagacaactatgctggacgtaatatttggttcggtgtacgtgagtttgctatggctgcagcgatgaatggtattgcccttcatggtggtactcgtgtttatggtggtactttctttgtcttctcaaactacttgcttccagcagtacgtatggcagcacttcaaaacttgccagtgacttatgttatgacacacgattcagtagcagttggtgaagatggacctactcacgaaccaatcgaacaattggcaagcgtgcgttcaatgcctaaccttaacgttatccgtcctgcagatggtaatgaaactaatgctgcgtggaaacgtgctttggctgaaactgaacgtccaacaatgctagttttgacacgtcaaaacttgccagtccttgacggtacagctgaaaatgctgaagctggtgtcaataaaggagcttacatcatctctgaagctaaaggtgatcttgatggtattatcattgcgactggttcagaagtgaaattggcgcttgatacgcaagctgctcttgaagcagaaggtgtgcatgttcgtgttgtttcaatgccatcacaaaatctctttgatgaacaagatgctgcttacaaagaagaagttcttccagcagctgttacaaaacgtttggctattgaagccggaactagctttggttggggcaaatatgttggtcttgcaggtaaaacacttactatcgatacttggggggcatcagcacctggtgaccgtatctttaaggaatatggtttcactgttgaaaatgcaagtcaactttacaaatcattgtaagaaaggaaagagcttggctagtccaagttcttttttcttgtaaaaagtgtttaacttcacacagagcttgacttttgggtctagagtgctagaatgacagtgttagccgatttagctcagttggtagagcaacgcactcgtaacgcgtaggtcacaggttcgaaacctgcaatcggcatggtcataggtgttcacatattaaaggggaggttttagaaacctcttttttctttagtcctagattgttcatttaagctaaaatttgataaaataaaaggtaaagaaataataaaggaagtatcatgtcaaaagggttattaatctcaatcgaagggccagatggtgctgggaagactacagttttggaggcgcttttgccacgtttaagagaagtttatccagctcaagtcgtgacgacacgtgaaccaggcggagtagctattgcagagcaaatccgtgaggttattctggacgtaaataatacggctatggatgctaagacagagctcttgctctatattgcggctcgccgccaacacttggttgagaaggttttgccagagcttgaaaaaggcaatatggtcattatggatcgttttattgattcatcagttgcctatcaagggactggtcgtggcttgaatcaggatgagattgcctggttaaatgcttatgtgactgatggttataaacctgacgtgaccttgttatttgatgtggattctgaaactggtttggctcgcattgcagccagcggtgaacgtgaagtcaaccgcttagatttagagaagcttgacttgcatcagcgtgtacgtcaaggttatttggatttggctaatgctgaaccagaacgtattaagttaatcgatgcctcacaggcttttgaagatgttgtagagcaagcttggaaagtaattgaaggctatttataaggagcaagatgaagttagctgaaagtcaaagcaaactgtttgaagagttttcacaaattatcagggaaaatcgtttgagtcatgcttatttgttttcgggtgattttggaagtctcgacatggctatttggctagcgcagagtcggttttgtttgactcctgagaatgatcttccttgtggtcactgtcgtccttgtcgcttgattgcacaagcggatttttctgatgttaaattagtagagccacaaggacagattattaagacggacacgattcgtcagttgactagagagtttagtcaatcgagctttgagggacaggctcaggtttttatcattcgagatgctgacaagatgcatgtcaatgctgcgaatagtctcttaaagtttattgaagaacctcaaagtcagatttatatttttcttttgacagctgatgatagtcgtatgttaccgacgattaaaagccgagctcaactcttttattttcctaagaacagagtttatctggaagacttgctgcagaaggaaggtttgttattgacacaagctaaggtcttggcagattttgctaaggatgaagcacaggctttggagttagctaaggataataaggttcttgatttggtcaatacagtggagcgtttttcacagtctctgctggctaatcaggacctgctttatctggatgttgcaaaactggctgtccagtgtagtgaaaagtcagaacaagagatggtctgggcttttttaacttatcaattggggaaggatatacaaaatccacaagcaagacgatggctagacttagtatatgaggcacgaaaaatgtggctagctaatgtcagttttcaaaatgcgatggagtatatggtgttatcatgactgaagtcattggaataaaatttgaagaaactggtacaatagaatatgttgtacctgatagaaattatgccaaagatgactttgtagtcgttttggataaaaaggataagcgtctggctcaggtcgttgtggagaatacaaattttcctgaagttagtttgcctactgatttgaaccgagttgaaggcctagccggagagagggattttgccagatatgatgaaaatcttttgaaggctgaaaagagtatatctgtggtggctgatttaatcactcaaaatcaactagatatgaaagtggttgacatcgtttttcctctagatagctcttatgtactgattagttttgtggctgaaaagagagtcgattttcgtcagttgctcaaggatttggcagcttactttaagacacgcattgagttgcgtcaaatttcaagtcgtgaggaatcaaaaatctatggtggcttaggaccttgtggccgggcactttgttgttctagttttttgggtgaattcccaccagtatcgattaagatggctaaaaatcagagtttatctttgaattctggtaagatgaatggggtctgtggtcgacttatgtgttgtctcagttatgaagatgacttttaccgagatagcaaggctagttatcctgatttgggtgatgaaattgaaaccaaggatggcacgggtcaggtcgttgctattgatgtgattgcagggaccattaaggttgtatttgaaaaagggcgtgcgcccctaacttatggagtggaggaagttcagctaaatggaaaagcgtgaattgtatgataaattcgaggaattatcacaaaatttgatgtcgatgttggcagaagtggaagcaattaaggcgaacttctcagggattcttgatgaaaatacggccctcaagttggaaaacgacaagttacgtgagcacttgagtcaagtggttcaagaggagacaggaactaagatgtctcatggcaaggtgaacctcgaggctatttacgatgatggattccatatttgtccagatttttatggccaacgtcgtgataataatgaagcttgtggcttctgcgcagaattgttgtacggagattaagcatgcaggttcaaaagagttttaaggggcagtctaactacggtaccctctacctggttcccacacctattgggaatttgcaggatatgacttttcgcagtgttcaaatcttgaaagaggtagaccttatttgtgcggaggacacgcgcaatacggggttacttctcaagcattttgagattgaaaccaagcagtattcttttcatgagcacaatgcctatgagaaaattccagatttactggagcgcttgaaatcaggtctttctttagctcaggtttctgatgcaggtatgccttccatttcggaccctggtcatgatttggtcaaagctgtcattgcggaggatattcctgtggtggccttaccgggagcatcagctgggattacagccttgattgccagtggtttagcacctcaacctcatattttttatggttttctacctcgaaaaaaaagccagcagattgactttttcaaggaaaagctgtcttatccagagacacagatcttttatgagtcaccttaccgtgtagctgatacccttgaaaatatgcaagaggtctatggcaaccgtcaggtaactctggttcgagaattgactaaactttacgaagagtaccagcgaggctccatctcagaaattttggattatattgctagtaatcctctcaagggagaatgtttactgattgtggccggagcttctgaaaatgatagggaagaaaatcttacatcagatgtaagtccagtcgaggctgttgaagctttaattgcttctgggatgaaacctaatcaagccataaaaaccattgctaaagagcgaaaattaaatagacaagagctttataacctttttcatggggtttaaggctctttttttgtggcgacataagatgtcagaaaagaaagaattatcaaaaaattccgtaaatacgcttgtttatctcatgtttttgtgttatattatctgacataaaatattttgtgaattggagtggtttcatggatacaggtagcagtgcctttatattgatttgttcagccatggtttgtttgatgacacctgccttggccttcttctatggtgggcttggacgtcgtaagaatgttatcaataccatgatgatgtctgttcttcccttagcgattgcctcgcttttgtgggttattgctggttattctttatcctttggtggacatggtcgtttctttgggaatttcagtcatctttttttaaatggcgtgtctgaagctgcctcaagtcgtggtctaaccattcctgatatgctgtttgctgcatttcagatgatgttctctattatctgtgtggcgattttgacgggttcagtggtaggacggatgcgttttacacctttagctatctttgttgtcttttggttgcttcttgtctactatccatttgcacatatggtttgggacgaagggctccttgctaaatgggggacgattgacttcgcaggtggtgatgtggttcatattacctcgggggtatcagccttggttttggcaatcgttgttggtaaacgtcgtgattttggcattttagaacaccgtcctcataatgttccttttgtcctattgggagcgggtctcttatggtttggttggtttggatttaatgcaggatcagccttggctgctaatggcttggcagtgcacgcgctagtaaccacccatgtttcagctgctgcagccatgttttcatggttggcaattgaaaaacatgtcacaggacatccatccttggttggtggttcaaccggtttggtggcaggactggttgcaatcacacctggagcaggttttgtttcaatttggagcgctattctaattggtcttatggttagtccgatttgtttctatgctatttctgtcttgaagaaacgttttgcctatgatgatgctttggatgcttttggttgccacggtgttggaggtatctttggtggttttgctactgcgatttttacgacaccagatttagccctagataaggccgatattggcttgatttatggaaaggcccatctctttattgtgaccattttagctattatctttacagctatttggtctgctcttgtgacctatggtattattaaagtaattgctcattatatgcctttacgtgttagtgaccgtgatgaagctattggtcttgatgactgtgaacacaaggaaacagcctatccaacttttatgggcttagattcgtaggaggatatagatgaagaaagtagaagcgattattcgttcggataaattggaagatttgaaaaatgccttgactggtagtggtttggccaaggggatgactgtaagtcaagttctgggttatggtaatcaacgtggctttgcagagtttgttcgtggacagcgcattgttcctaccttattagctaaggttaaggttgaaattgtagttaaggatatggcggttgacgaagttgttgatgccattcggagcgccgtggcgacaggggaagttggtgatgggaagatttttattgttcctattgatgatgttatccgcattcgtactggtgaacgtggtggagacgccatttaatataatgaaggcttaaaccggttggtttgggtcttttttagtgaattttgatatacttagaggagttagtatgattgagggggtgaccaattggcaaaaggaaaaaagaaaagcaagtctaaagctagacctaagaaaactaaaaagaaacagaagtctttcttgctctttcctaaatttttccaaaagtggagtctgatttttattggcctatttgccttattgggactcctagctagtttaaattttccaaagttgactatggaaaagaacatgacatctacagatgagaggacggttgcttttattgccgagattggcgagacgtcgcgctatttggcagctagaaacgacctttatgcatctgtcatgattgctcaggccatcttggaatccgactctggacaatctactttgagtcagaagccgtcctataacttctttgggattaagggggactacaatggtcaaagtgtgaccctaccgacctgggaggatgatggtaagggcaatccttactatattgatgcggcttttcgttcttatggttctgtggaaaattctttacaggactatgtggatttccttgagggaagctactatgtaggggtgcaccgttccaatactaggaattataaggatgcgacagctgccctaacaggggtctacgctacggacacaacctacggagacaaattaaacagcatcattgaacaatatcagttaaccatttatgacacttattagggtcgaaggagagtaaaatgaatcagaacaaagtgaaactcattgcaatagatatggacggaacactcttagatagccaaaaagagattcctgcagagaatattaaagctattcaagaagcagctgcggcaggtatcaaaattgtcctttgtacaggacgcccacgttcaggcattcttccccattttgagaaattaggactgagtgaagaagagtacattatcatgaataatggctgttcaacttatgagacaaaaaattggaagttgcttcaatatgaaagtttatctcgctccgagatggaagaactcttgcaggcttgcgaagacttcccagaggtggctctaacctttactggtgaaaaaacttactatgttgtgggcgatgaggtgcctgagctagtagcatatgatgctgggactgttttcacagaagcaaaagctaggagtttggaagaaatctttgcggaagggcaagtgattttccaagccatgtatatggctgattctgaacctttggatgccttccaaaatgctgtgcaagacagacttgatcagagctatagcacagttcgtagccaagaatatatctttgaaatcatgccacagggggcaactaaggccagcggacttaagcatttagcggaaaaacttggaattgctccagatcaaatcatggctctgggtgatgctgctaatgaccttgaaatgcttcaattcgtcggtcaaagtgttgccatgggtaatgctagtgacgacattaaagagttgtgtaagtatgtgaccttgacaaatgacgaggcaggcgtagcccacgctattcgtacttgggctttataagaaaaagacctttagcttctatttgctaaaggtttttcgatttttaataatggcaataagagtagtcagtgtgatagtgatatcagtgacagtagctgggtaagcctgaatggtcaaatcgtagatcagccaaagtaacatattttcaataatgacccagcgaagccactgaaggtttggtgtgatggcaatggctaaactataagagactgaagagatgattggcagatagccaataagtccaagttgattgagataggttcctacaatgatttgaataacgatgaggatggtcaagatagtcttggtcatctgctttttgaccatcaagctattacgtatgatggaaatactaatggttaaagcaccggtatagccacccaataagaggttggcaatagcagtaaaaatgtagtcggtaatttgccagaccagcattttatgttttgattttgcaaaagaagatatggcgacacatagggcacctatggctgagaatacttgtgctagaagatagattgtcatgatataactttcaatttttgtctccattatatcacaaggattcaagagattttcatcgcttttttagaatttacaatcctaatatgttagcgtttacattagaaaatgatataatgaaagtgtagaaaagattattcccttagaagtagagagaacccgatgttgccttgtgacataggtcctatctttactttttacgatagactagaaatgaggaaataattatgaaaaacaaattttctcaagcaatcgtgctttccatggttaccctttcctcagtggctttgctgacggcctgttccagccataaggaatcgagttcagcagataagatgccaaagagcagccaggtgacctcatcaagtaaggctaaaacatccagtaaagatagcggtaaggttagcaagtctagtgctaaggtcaaggaatcttcgggttcaaagacagaatcttcaagtgtaccgagtagcaaaaaggcttctgccccaagttcaagtagtagtcaggctcagtcatcatcttcaaatagttcatcagttccctcaagcagtcagtcacaggctcctaagtcttcagcgagtcaatcccaagcaccaaagagctcaagtgatagtcaagctcaagctaaaacggatacgcaagtaaccaccgtggatatggatgtgagtgcagttgcgcgtggtcagtttgacagtattgctgggacttggaagtctagtgatggcagtcgtctggtctttaacaatactagcttagtaggagatattacgccccaaggtcaagcaactagtcataattatgtgcaccctaaagatggttatcaggagggttcaggcaagtatgaagcaattctttcaagagataggggtgacacctctggtattgttggcgatattagttttgtttctaaaaaggcagctatttctggtcctagctatgaacaagataccattcaagtaaccagtactggtggaacaaaagtctactttaaagaatcagacaatgtgacgctacctaaagacgtgacagttactgacaatcaacttccaattgatggtggtatcgcagaatctggcagctacacgctcaccaaacgtacagctgtcaaaaatactcctagtgatacggctccagttgaattttacttagaagcaggcgataagattaactttgatatgaaggttactcaagacggtcatagttggatttcttacatcagctatagtggtgttcgccgttatgttcaagtggattaaataagatatctagaaaggtcgaaatttcttctgatctttctattattttgtggaaaaagccttgtctattccctaataaatcgatacaatagaaaggtcggtttaaccgaaaatttttaaataatgaggacaaaaatgtgtcagtaaattggcaagatattgcgttttctttcctcggtggtttggggcttttcctctttagtatcaagtatatgggagatggtcttcaacaagcagccggagataagttgcgcttttacatcgataagtataccagcaacccgtttttaggggttttgattggtattgtcatgacggccttgattcaatcgagttcaggggttaccgttattgtcgtcggtctggtttcggcagggcttttgagtcttcgtcaggctattggtattgtcatgggggcaaacatcggtacaaccgtaacttccttcatgattggtttcaagcttggtgactatgcccttccagtgattttcctgggggctgcgcttctcttctttacaagcaataagaagctcaataatctaggacgtatcttgtttggtgttggggggattttctttgcccttaaccttatgggagatgcggtagaacctttgaagtcagttacagcctttaaggactacttggcaaccttgggtgatcgcccagtcatgggggttatcatcggtgctggcttgaccatgttgattcaatcgtcagcagcgaccatcggtattcttcagagtctctactcaggtggtttgcttgatctgcaaggtgcccttccaatcctctttggggataatatcggaacaacaatcacagcggtactagcagctcttggttcgaacattgcggctaaacgtgtggcaggggctcacgtcctgttcaatgttattgggacggtcttgtgtttgattcttttggtaccattcacagccttgattcaatggtttaagtctgtgcttggattgacacctgagatgaccatcgcctttgctcacggtacttttaacattgcaaatactatcgttcaattcccattcatcggagttctagcttaccttgtaactaagattattcctggtgaggacgaaattaacaagtacgaagcactttacttggaccgtttgcttatcacacaggcaccagctatcgcccttggtaatgccaagaaagaattggtgcacttggcatcatacgccatccagtctttggaagcttcctatgctttctttgctaagggagatgagaaatacttcgataaggttgagaagtatgaaacagcagttaatagtattgacgaagagttgacaacttacttgattgacatctctaacgaatctctaagcgtttctgaaaatgaagtgttggcaagtgtgcttgactctgttcgtgacttggagcgcattggtgaccttgcagttgcaagtgcaaacctttcacaacacattcataataagggaattgaattttctgatactgccaaggctgagcttgcggatgtttacaaccgtactcaccgcatcgcccttgatagtattcgtgtggttgtagatgatgacaaggtacttgcaggtcaagttatccttcgtcatgaagagttggaaaaacttgaaaaacaattgcgtaaaatacataccaaacgtcttaacaatggtgaatgtactgcgcaagcaggtatcaactatgttgattacctctcacattacacacgtatcgcagaccatgcgattaatcttgttgaaaaggttacagagggtgtgatttaatagagaaagccgagaaaaattctcggcttttttgatataatgaaagcgtattaagaatatagaaaaatgatgagaggtggtcctatgacctattatatttcagccaaacgtttttactttgagaataaaatcaaggaaggtggctacctagaggttgtggatggtcatttcggtgactggacagaaaaggtaccagaaggtgcagaagtactggattacagtaattatcagattgctccgggtcttgtagatactcatattcatggatttgcgggttatgatgtcatggataattctgaggaaagtcttctaggcatgagtcaagccttgctttcagcaggtgtgacctctttcttaccgacagccctaacagcgccatttgaagagctgaaggctatttgccaaacaacagctaatactattggtaaggaaactggtgccaaaattcaagggctcttctttgaaggaccttattttactgaaacctataagggggctcaaaatcctaaatacatgggaaatccaagtgtgaaacaattgcaggcatggcaggaggcggctcaagggaaattgattaaattggctctcgctcctgaacgtgagggagtggctgaatttatccaagaagcaaccaagaaaggcgtcactattgctctaggtcattctaatgctacttatgaagaagccatggtagcagtggaagctggggcgtctgtttgggttcacgtctacaacgggatgcgtggttttacacaccgtgagcctggtatggttggtgcagccttcgatagtcctgaaacgattggtgagctgattgcagatgggcatcacgcggtccctgcagcttgtaaggttcttatcaagcaaaagacacctcaaggagttgcccttattacggactgtatgtcagcgggaggacgtccggatggcgactatatgctgggtgaacttcctgtcatcgtcgaaaatggtactgcccgcctcaaagaaggtggtaacctagctggatctatcctacaacttaaagacggtgttaaacatgtggttgactggggacttgtgacggttgctcaagctcttcagatggcaactagtgttccagctaaatcggttgggcttgaaaatatttgcggaagcctaaaagtaggtctaccagctgattttatcgtactagatgattccttggacttacaagcaacttatgttgatgggcaaaaaggttgggaaaaataagagtatgagtagcactttcttatgaaggtgctgtttttaattgatttttacaaaggtgtcagagtagtgtaaaatagaaatactttttattttacaggaggtaatatgtcaaaacgtatttggagcattgccctggcctatgtcggtgtaatgattggtgcaggggtgtcttcaggacaggacctcttacagtattttgttagttttggagcctggggactgataggtgtcatagttctaggaattttgcatgttggctttgggcgactcatgattgctctgggaagttattaccgctcagatgaccattcggtagtcctggcagaaatcagtcatcctgtgatttaccgtattttggatatcgctttgattatcacttgtttcctgtttggttttgtgatgacagcaggtgcaggggctaacctaaaccaacagttcggctttccgatttgggtaggtgccttcctgtgtacagccctgactatctttgtgagtttcttagattttaaaaaaatcattggtgttattggagtttttacccctatgattttggttatgattgccatgatattcgtgaccaatgttttaggacgtcattggggttttgctgagatggataaggtgtcgcaaaccattcaatctcccttcccaagtatttcgctgtctgtggttaattattttgccgtttgtgtcatgtcagccatagccatggcctttgtcatgggtggctctattctcaaaatcaatgaagctgaaaagagcggagcctggggaggatttatggttggtgtgattttcttcgtcacaaccttgattctctttgctaacagtgataaaattgctagctcggatgttcctatgttggctattgctaaggaagtgaatcctatctttgcgacactttacgccttggtgatctttggtttgatttttaataccgtctttagtctctactatgcccttgggaaacgcttctcagcaggtagtgagaaacgcttcaagttcttcgtggctacatttgcccttgctggttttgctatttccttcatgggcttccgtcaactggtagcagttatgtatcctattattggttatctgggaatgctgatgttggtcgtgctagttgtggctagctaccgcgaaaaagccaaaattcgtaaggaaaaggaaattcgaaatcatctcttgtctatcgttgagaagtcttatgattccaaccaagacttgacccatcaagacaagaaaaaggccgaagaacttcgagaagcctcaattattgataatgacattctccataaagattcccatgcacatgttcgtcaggaaatgggaatcagtaagaaggattagaattttattttacaagtttccctatttctgctataatactgacaagaaagaagggcttatggcgtttttctagcgagcttgggatagtgagagccaggtagagcaaagtaagtaagtggcgctttctctcagcaaagagctgagtacaacagataaaatgaagtaataaattagggtggaaccgcgtttctgacgcccctaggtcaaacgacttaggagcagagacacggttctttttgtatcctgagtcataagaaactttatgaataaggagtaaataatgtctaaaaaactaaccttccactgtgtcagtggcagatatctccttatagtcggactgccccacgctcagcactaggatgcctgagctagacgcagtactaactcgtcttgcctcgtataatcgacggggcagactcgtgtcgcaagaaatcatttaaatcaaggagtatttaatgtctaagaaattaacatttcaagaaatcattttgactttgcaacaatactggaatgaccagggttgtatgctcatgcaggcttatgataatgaaaaaggtgcgggaacaatgagtccatacactttccttcgtgccattggtcctgaaccatggaatgcggcttatgtagagccatcacgtcgtccagcagatggacgttacggggaaaacccaaaccgcctttaccagcaccaccaattccaagtggtgatgaaaccatcaccatcaaacatccaagaactctaccttgagtcattggaaaaattgggtatcaatcctttggaacacgatattcgtttcgtggaagataactgggaaaacccatcaactggttcagctggtcttggttgggaagtttggttggacggtatggaaatcactcagttcacctacttccaacaagttggtggtttggcaactggtccggtaacttctgaggtcacttacggtttggaacgtttggcttcttacatccaagaagtagattctgtttacgatattgagtgggctccaggcgttaaatacggggaaatcttccttcaaccagaatacgaacactcaaaatacagctttgaagtttctgaccaagacatgcttcttgaaaacttcgaaaaatttgaaaaagaagcaggacgtgccttggaattgggtcttgttcaccctgcctatgactacgttttgaaatgttcacatacttttaacttgctagatgctcgtggcgctgtttctgttacagaacgtgccggttacattgcccgcatccgtaacttggcccgtgttgtggccaaaaccttcgtcgcagaacgtaagaaacttggttacccacttcttgacgaagccacacgcgcaaaactcctagcagaagaggaagaataataagcgttacaagaatggaaaatgggcaaacaaagtgagcccacatggctacccagaggcaagttgaagacttgctaaagggataagcgccgccgtactggtatatggggatttttgaaacgttaggttcaaaaatcagttagctaaatccactttgatgagactgttggaaatcgctgtcaaggagacaccagatttccatacagcctcacaaagttagttagcaacgtccccagtacctaaggcgcctatcaaaaaaagaattttgtaaaggaagaaacatgacaaaaaacttattagtagaacttggacttgaagagttgccagcctacgttgtcacgccaagcgaaaaacaacttggtgagaaaatggcagcctttttggatgacaaccgtctttcatacgaaagcattcaaaccttctcaactccccgtcgtttggccgtccgtgtacttggcttggctgatcaacaaacagatttgaccgaagattttaaaggaccttctaaaaaaatcgccttggatgcagatgggaacttctcaaaagcagcccaaggatttgttcgtggaaaaggcttgaccgttgatgacattgaattccgtgaagtcaaaggggaagagtacgtttacgtgacgaaacacgaagctggaaaacctgccaaagaagttttggctggtatcccagaagtgcttgcttcattgacgttccctgtcagcatgcactgggctaacaacagctttgaatacattcgccccgttcacaccttaatcgtccttttgggagatgaagcgcttaaactagacttcttggatattcaatcaggtcgtgtgagccgtggccaccgtttcctcggtcacgaagtggaaatcaccaatgcagactcttatgaagaagaccttcgtacggtttacgtgattgccgacagcaaagagcgtgaaaacatgattcgtgagcaaatcaaggctatcgaagcagaacaaggtgttcaagtccaaatcgaagaaggacttctaaacgaagtcttgaacttggtggaatacccaactgcctttatgggaagttttgacaccaaatatttggacgttccagaggaagtattggtgacctcgatggaaacgcaccaacgttactttgttgtacgtgaccttgatggtcagctgaaaccaaacttcatttctgtccggaatgggaacgctgagcacttggaaaatgttatccgaggaaatgaaaaagtcctggtggcccgtcttgaagatggtgaattcttctggcgtgaagaccaaaaacttaaaattgaagacctcgtggctaaattggcacacgtgactttccatgaaaagattggttcactctctgaacacatggcccgtgctggtgtcattgcagcttccttggctgagcaagctggtttgactgccgaagaaagagcagccgtagcgcgtgcagctgaaatctataaatttgacctcttgacgggtatggtcggagagttcgatgaattgcaaggaatcatgggtgaaaaatacgccctccttgctggtgaggatgctgcggttgcgacagctatccgtgagcattaccttcctgatgcagcagacggcgctcttccagagactaaggttggtgctatccttgcgcttgcagataaattagataccctcctttccttcttctctgttggcttgattccatcaggttcaaacgacccttatgcgcttcgtcgtgcaacacaaggaattgttcgtatcttggatgcctttggttggcacatccctatggatgagttgatcgacagcctttacgctctttcatttgctagtctttcttatgacaatcaagcagaagtacttaacttcatcaaggcgcgtgtggacaagatgatgggacgtacaccaaaagatatcaaagaagctgttcttgctggttcaaacttcgtggttgcggatatgcttgaagcagcagatgctctctcagaagctgctaagacggatggctacaaggcagctgttgaatcactctcacgtgccttcaacttggcagaaaaagcagatgcttcagtagcagtcgatgctagtctctttgaaaatgatcaagaaaaggcccttgctaaggcgattgaagagcttgaattaacaggttcagcaagtgacaaaatggcacagctctttgctcttagtccagtcatcgatgccttctttgacaataccatggttatggctgaagatgaggctgttaaaaataaccgtttggccctgcttgcaggtcttgtgtctaaagctaatgctgttgcagcctttaatcaattgaatacaaaataagtacctgttgacaggtagaaagtaggtctgataatgacacctgaaaaaattgctcggatcaatgagctggcaaaaaagaaaaaaacagaaggtttgactcctgctgaaaaggtagagcaagccaaactccgtgaagaatatattgagggttatcgtcgctcagttcgtcaccacatcgaaggaattaaagtggttgacgaagaaggtaacgatgtgacgcctgaaaaacttcgtcaagtccaacgagaaaaaggcttgcatggccgtagccttgatgatcctgaatcataataaccattaacaagggtttggagatttccaagcccttgttttagagtgtaaaattctgaatattctgtataaaattgaccgattatgcaaaaaatggtaaaatataagttatgttaaaaatggtaggactcaatgagtcttgcttaatagaattggagtgaaaaaaatgtcgcaaaagcaacatcataaagacgacgacaaccagactgaaaatgggatggtgcgtggtcttcagaaccgtcacgtccagctgattgccatcgctggtacgatcggtacaggtctcttccttggagcagggcgttctctctccctaacaggaccttcaatcatcctagtatatatactaactggtatcttcatgtatcttatgatgcgagctatcggtgagatgctctacatggatcctgaccaacacacctttatcaactttattaccaaataccttggtaaaggctggggattcttctcgggttggtcttactgggtatcactgatattccttggaatggcagaaattacggccgtatcgacctatgtgcaatattggttcccaagttggcctgcctggcagattcagattatcttcctgattatcttgagttcggttaatctaattgcggttaagattttcggggaagttgagttttggtttgggatgatcaagattatcaccattcttgctcttatcgcaacaggtatcttcatggtagcaaccaactttgaaacccctgctggacatgctagccttgccaatattacacacggcttccagatgttccctaaaggttgggtaagctttgttatgaccttccaaatggtcttctttgcttaccaagccatcgaatttgtagggattacaacttccgagacagcaaatccacgtaaggtcttaccaaaggcaatcaaggagattccgattcgtattgtcatcttctatgtgggtgccctcattgccctcatggctatcttcccatggcaaaaacttccagttaatgaatcaccgttcgtaacggtcttccaaatggctggtatcaagtgggcagcagccttcattaactttgttgtcttgacagcagcggcttcatcattgaactcaacgctttactctacaggtcgtcaccttttccaaattgctaaggaaacaccaaatagtaaagtcatgaaagctttgaagctagatactttgtcacgtaatggtattccttcacgtgccctcattgtttcagccattgtagtatgtgtttcagccttcatcaatgtcttgcctggtgtatctgatgctttcgctttgattacggcatcatcatcaggggtctacatcgccatctatatcttgaccatgcttgctcatctcaagtaccgtaaatctcaagagttcatggcagatggcttccttatgccagcctacaagattctcaatccattgactatccttttcttcatcttcgtctttgtttgtctcttcttgcaaaagtcaacagttgtcggagctattggagcagccatctggattgtggtatttagtatctatagtaactggaaacacagcaaataaatcaatttagctcacctttatggtgagttttttattgcaaaaaaaggacacaaggtgtcccagttattagttatgcaatactttcttgatttccgtggtgaaagaaagcacctaagaggcccttgctacgatggaaaatagcaggcttatgatcgttgtgtgaacgaccattaacatcaagtttggcccattcaagagcctggtaggcatttcggtctgaaactgtagatgtcccaatatagctatagattcctgcctgagcaagaataaaaccttgtagttggcgaatatgctcatcattgagggcttcggaaaaatgaatcttcactgtcttataagttaaagcttggacagactcgacgattggtgactctgctaagaggtgcaaaagttcttgatgcttagtaaagtacttatcatagtccattggaagaatgatagtatgggcaatccaatcttctaagttggctttggctttcttactgagaccttttgctgtgatactgagatcatctatattgaaaggaagctggtcgatgtgagcagtgtttgaaccatatgcctttctgaaaagcggtgtacttgatagaatatgtccagtgggagaaataatagccaaggcagtttccttggtttggtaaccaagttcgtggcattccatgctagcgtatgtgtctttaaattcaataattgctcttgttttcatcgtgtaactctctttctgttagtttataaactaacaatagtttatcatgacttataatcttggtcaagattttactttcaaaaacaaaataatatttttgtaagggcttgcaaaaacgtttgaactctgataagatagaaccatagcaaaaggattgttactggtcagcaggcaaaacctagataaatacgaaaaactaatgggagtagtgtatgttcatcccaattggttcttggtatttatttaggtttttttcgttgaaaaagcctcaaagaaaactaggatcctagacaagaaaggagcccttatggctaaatatactgaattagctgaggacattctcaaacacgttggtggtaaggaaaatgtcaatagcttaaaacactgtgtgacacgtttgcgttttgatttgaaagatgagtctaaagcagatgatgactaccttaagaaccgtgacggtgttgttactgttgttaaggcaggtggtcaatatcaggtggttatcggtaaccatgtccctgatgtttatgcggaggtcctccaggttggcggtcttccagcgggtggtagtcttgatcttgatgaaggtgatgcgcctaaagggaatctctttgaccgctttgtatctttggtttcaagtattttccaacctttccttgggcctttggctgcagctgggattatcaaaggaatagtcgctgtcatggcagcatgtggcctgtcagctgcaacaagccctatgtatgtcatcttgaatgcagcaggagatggtttcttccagttcttgccaatcttaattgccttgacatctgctcgtcgtttcaaggttaatgagtttacagctattgcgattgcagcggcacttgtttatcctgatattgctactctggtgactgctcttcaggaagctggtcaaggtcatgttctaggagttattccatttgcgcttcctgcagggggctacctctcaactgtaatgccttctatcttggccgtttgggtggcttcatacattcaaaaattctttaccaagattactccagatgtcattaaagtcttcgtagtacccttctttacattactcattactgtcccattgacattcttggtggtaggaccagttgctaatactttctctgatggattgacaaatcttttccaagcgatcatgaactttagtccgattgtctttggtcttgtacttggtatcctatggcaagtcttggttatgttcggaatgcactgggcgcttgttccccttgctatcttagatgtggcaacaaacggaagttctacgattctttcagcagctatccttccatgtttcacgcaaacaggtgtattgggggctatcatgcttaagacaaaagaagaaaaagtccgtatcatttctatgccagcctttgtttcatctatttttggtgtaacagaacctgctatctatggggtgactcttccaatgaaaacaccattctacatttcatgtggtgtttcaggacttatgggggctgccatgatggccctagatattaagacgtattcaataggtggtctgggtgtttttgtcttcccaagccttattggaccggatggtaacctttctaaagttatctttaccattattattgccattgtgggtggtgttcttgccttcctcatccaactctttgtgcgagtaccaaatctatacggtggtggagcagctaaggttgaggaaaaagctgaagaagctgcacctgctcctaaagaaattcaacaagaaattattgcgagcccacttatcgggaatgttgtcccacttgaccaagttcctgaccaagtctttgcctcaggagctatgggtaaaggtatcgctattgaccctactgatggggtagtggtcgcaccagctaaggcaactgttaatttagtcttccctactggtcatgcgattggtttgacaactgaaaatggtgcagagcttctcattcatattggtatggatactgtttctcttgctggtaaaggcttcaagacctatgtggaagcaggtcaagttgtagaagcagggcaaaaacttatagaatttgacctagcaactatccgagaggctaaattaccagtcatcacgccagtcattgtgaccaatacagctgactttaatgatgtcttaacgactaaagaagctcgtgttaacaccggtgactatctcctcactgctgttaaataaaaaagaaatccgagaatcaacttctcggatttttgtttatttgaatttgtagtctttaacaacttcaacggaattaaccgttacattttcttttggtttgctgttgtcatcgacttcaaggttagcaatggtatcaacgacatccatgcctttgatgacttgtccaaagacagtatatttggtatcaccagctgggtaaccgccttttttgtaggcgtcaatgataggttttggatagccggcatttcctagttgcttgctttgatcgtccttgttttgaacaatgtagaattggctgccgtttgaattcttagcaccagtattggccatagcaagtgcgccacggatgttgtagaggaatggtgtaggctcaacagcgaaacctttcttccagatagattctccgccagtaccgtcacccttagggtcgccactttgaatcatgaagtccttgatgacacggtggaaggtaagaccatcatagtatttgtcctttgcatgtttcaagaagttttcagaagcctttggagcaagtgtagggaagagtttgactgtgatatcaccctttgaagtgtggaggataacttcagcttcgtccttaccgaccttgtctgacaactgtgggaaggcatcttttccagatttttgggctttttctaattgtttagtgaatatcttattatcaacataagcatctccacgaacggcgcgtgagatgttctcacgaaaggcaaaacctaggcctgcgataacaagtacaataattaatggaatgtactttttaatgtttttcatatataactcctttggtgcattatacctactattgtagcagaaaaaaaccttttgggaaacggttaacagaggtctttaaatatggtagaatgggattatcaacaagaagatgaacaatgggactagatataggaaaaaggttgcctcaggctaaaaggtgagggctgacttttggaaggacgcatgctacttgctcttatcagagataggtgtctaaatcctaactatagaaaactttgctaagctgaagggacctcttgtttggatttcttgaaaaaaggagatttttatgtcaactaaagcagaatgggctgaactctttgagtcggtacatgggcgtaagcctagcccccaagaatttttggatgctaaagcagctgactttgatacaagtgctttggctgctcaagcagcatctgtagaagcaccagctaacgaacctgtcgctgaagaagtagctccagaaccagttgctactgaagaagtggcagaacaagatgatatcgcagatgtggctgaaacagctgaggatgccgtcgcagaacaagcaagcagtgaatcaccatttggtgcagaagctttctcagaagcacctgtgcaacaaccaacaccacaatttgattcaagcatgtttgaaaaggcacctatctcatcagctcaaggatttggaacagttcctaatccagcagcagctggctcagcagataaacctcttttcaatcttatcttgccaatcgttgcgattgcactttcagtaatctttgcagtcttggcatggtttgtaagtcctgcttggctcttcatcatcttgacagtcctcgcagttgcagtggcagttgtttcacttgtctttagccttaaatcaagcaagaaattgctctcaattattgcaacaggtgttgctggtctcatgctctttgtttctattggtggtttgattttccaaatctctcaaaacgctagtgacaacacaagctcaagcaagacatcaaaagttgctgacaaagacgatgatgacgctgacaagaaagatgatgacagcgattctaaatctgattctaaatctgattcaaaaggtgatagtactgatgtcaacgactacattgacaaaaatgctaaatttgattggaatgaatctaagttcaagaagttgaaagcaggtaaggataccgttaagtctatcatcaagacttatggtaaggcttctgatgcacaaatctctggcgatgagatgaagttgaattactctggtaaagactatggtgaaagtgtttacctaaactttaagaaacaatatgacggtacatttatcttgtcatatgcttcaggtagattccctcaagataaggtagaagttgatcgctcttacaaagctgattggacaaaagaacagtttgatgctctcactaagggtgattacactgatccatcaaacggtacgaaacttgaagatatcgttaaggatcaccctaaagcttcaagtgcagaatacacaatctcaacatctcgtcaaggtgaattcaaaaaagaaatgagcatttcttatagtgactatgaggctggagatggtaaactcaagagtgtttacttgtcatttgataccaaagaagatgacgatacgttctaccttacttataaatcaggtccagatggcgaggattaattaaggaacaggaggggaaaccttcctgttttttcttgataaaaggagaaaactattgagatttttaaattatacattcgagcaaagtcagtctcttgtcactaaggagaccgtagaaaagctcaatcaaaaaggaagctggaaacgatttattggcttgtttatcacttcaattgttatttatttcttctctattatcacacccatgtttataaaaggattgacgcttgatcaaaatccaacattttcttggattcagtggccaatcattcttttctatgtagtcatgtatttggtctatcttttcttttcaattaagaacagaagaagcccgatgaaactaaaattttgcacctacttttacatggtagtcttactcgctatctttacagtatgtgccggaataatgatgatgacacgacgaaatattgtcagtatactatcgggagctatgtttcttctgtccatttattacttgattcgaacggttccccgtaaactgaaagaagctgttcaaaatcagacagagtttagccccatggtagcacttgtgactgaaaagatttcggatggtttagtctttttaggtggaaccgggattacaggtgcccttgtgctctttgaccgctccactggaagtgatactagagggagcattgatgcggtgttgatgcctattatgcctgccatatttgtctttgcgacttatgtcttttccattgatttgctacgaggttattacctcttcaaatactctgagcaatatagagagcagtttggctactcagctaaggattggtatggagagaagtcgaaggagtataggaggatacagggctaagttgtggttaaagtaatgtatgaaattgatggcaaaatgcttgaagttaaaacaattttaaaccgtattggaggataaaatggaaaaacaaattaatgaaaaaattcgtgagattgctcagagtgttaatgaagaggggaaaaatgagtatatctacaatctctatattccaaagcaatataatttttctaataatactgaaaatatagatattgaaaaaataattcaacaaattaaaaggaatcttctaaatcaaggggtaatcttaaatgactaacataacattttcacaagttcaaaagagttttcacaagaagttggtgttagacattcctgattttcaagcggattcaggtgaaatcttctccatcgttggtggcaatggtgccggtaagtcgacttttatcaagctcttggcagggatttttttgcaggataagggcgaggttcgtgttcatagcgtttctaatcgctccaagaaaatccactcgctggtcaagtttgtcttggagagcgggcaggggttgtacagttatttgacagctatggaaaatctccaatattttctaggcttgaatgggattgccttgtctcatatcaagtcagaagtggatatcttatgtgaccagctggcttttaccccttataaggacacgctggtttcagaactgtcccagggcaaccgtcagaaattgaccttaatcttagccttagtacaaaaaccgaaagttctctgtttggatgagccgaccaatgggctagatttgctagcaaaaaaacagctgataactcttttgcaggattatgctcgttaccatcaagcaagtattttcatcaccagtcatgacgctagttttatcgagaaggtcagcactcgggtggtggtaattcaggaggggcggctttatcgtgacggaacctttgaagagatttttggcaatgtccaccagtatgaagtctatcacttgcttctagataagagtgcagaaagtgtactgagacaaaactttactgagctagactacaaggtacttgatggtgggatttcggtagagaccagcaatccagacctttatcggctattgctggaagaaacggaagtcttgcagttcacccgagaacctgcctctttggaagatttgctgtatgaggtgctcaaatgatgctagcagcgattgggcgagagtttagtcgccaactcagtgaatacaaacagttcaaagtcaatcttctctttgccaatttgggaattttctttctggttacgggttttctgaactattttgacagtcagaaagatacttttgagctgtttatcttgctttttacttggtatttttctagccacagtatcactcatccgacctattttatcgaggatgagattgcagaccgcaccattatcaacgtgattcagagtcggaggagcatctttgtcatgctttttatcaaaattatcgtacagattttgttggacttggtcaaggccattcctttgttttgcttggttgccttggttcagcagattgcctttcctactgactgggtcgatacatctgttacctttcttctgtcctttgtggttattgcgtccctttatggtctaggctttctctttgccagtttttcctttgtctttacaaaaatttccagtattactagcctccttgcttacgggattctctttttgattggttttcaggaacaatcgagtcatttgattgctactttaactcgtttcttgcctttccatctcttggtgagttttatccgccagccaagttggttcgttcttttattattactgggatacggtttgatttactggctcttgggttacttgtgctttcaaacttgtttgacctatgccaaaaagaagggaagtttgttccatgtataatgaagtgaagcgattttatctctttcgcaggagacgctgggcggataccctgtttgacaccctctaccacgtcattttcattcttggtttttatagccttttgagaggaaattctgactttcagttgtcctatttctattattatttcatcttgacccatgtggtttccttgggaaatgaagagttggagtacgagattcggtctgggcaatcttttggcacccagtatgccttgcaatcagtgtatagaatttacctgcaacgagcagtggtttactttgtttggttgtctttgatcttctggattgctctgcttttgattcatcagggtttaccaactcacttttctttgaaggtcatcagtttccaaggactgttcgtggtactgattggtttcctgattttcctcggctattatcttgtcatgattcgactgactatccgcttccaacgaatttcagtcttggtagattttctaaacaccgtgctcttattctactcaggactcgtctttccagtggtgagttttgggaatttgaagaaattatttgatgggattataagaaattaaggattctttttcaatgcagagtcctttttctattgaaatcttcttttaattcctatcctctgagacggtgaaggtgatatactcacacttacagtggacagtgaaaatactataattcactagaagtgaactgccccaaaaagtgtgatcgaaaaaatcttacttttggggggagtttcttttcttcttccattttcatgagatggcttgttacttaagcaccgaaggcagtctcaaaaaattctctcttatatccgaccttattttcctaagaccagattaaagtatgataaaataaagaaaaagagataaaggagtcagctatggcaactagagaagaatgggtgcgtcactttgaggacgtcaatgggcgtaaaccaagtcctgaggagtttatggaagctaagaaagagggctttgttatcgcttcggaggaaccaagtgcccaagtgtctgagcaggctgaggctcagcaagtggatagctctgaaactactgaagaggtgtctgctgactcagtagcagatacgcaactagacgaagttcaggtgacattagaggaggaggctcctaatcacatgcctgagttgaatctggagaaagagcaaaaaaaagaaactccaaagacaagtcagatacctttggaaaacccttattacaagccaaaagtaaccaagaacaatgcttttgttaatattgctttgccaatcattattctagttttggggattctatttgtcattttgtcttggacacttcctatcggttttgtctttaccttccttgctttcttccttatcattttggctattgtgactttggttttgagtctgaaatcgacacgcaaggcactatctattattgccctagtcatgtcaatcatcttctttatgacttcgcttgctggagcaggttatcaagcggtgaaatatgtcatgaaccatgctgaacagttccaaagtgacggtcacgatagagcttatctgtacatcgatgagaattataagtttgactggactgaggatcagtttaaggagttgaaggttggtactttgacattggacgaggtcttggatgctcacggtaaggcgactgatgccgagtatagtgacgcttacgaggaagataaaccagatttgctagacctcacctatagaaaagaaaacacagatggaaacaactatgtgcgtttgacttttgagcaaaaagacggtgtctatgttttgaaatctgcctcagcaaccttcgactatgataaggtcaaagaagtcgatgactatcatagcaactggacaaaagatgactatgaaaagttgtctgtaggtacacaagctgatttgcttaaggggacacgactttctgaagtggttgaaaaacacccagaggctagcttcacttatcatgaaatgacacaaactgaacagggcgatctcactcagtcagtgagtcttagctaccgtgattataatccagaaagtggtaaggtagatactgttcgtttgacctttgactatgacaaacgtgaaaacgagtacttcttgacagataaatcagacgaataggactactttgttagtcattcaagctcagggttgcctgggctttttagtatcaacaaaagaggataaaatctggtataataggtgtgattgatttttcaagaaagaagtgtcacagatgaacatacaacaactacgttatgtcgtagccattgccaacagcggaaccttccgtgaggcagccagcaagctctttgtgagccagcctagcctatcagtggctatcaaggatttggagcaggagttgaattttcaaatattcacccgtacaacgacgggggctgtcttgaccagtcagggtatgaccttttatgagcgtgcgcttgaggtggtacgcagttttgatagttttgaaaatcgctatctcaatgcttctgaaaagggtaaccagtattcgattgccagccagcactatgactttttgccacctttgatcacgactttttcagagcgctatcctgattacaaggatttccgtatctttgagtctacgaccattcagattttggatgaggtagccaaggggcacagtgagattgggattatctatttgaatcgtcaaaatagcaagggaatccagcaaaatatggacaagcttgggcttgaagctattgatttgattccgtttaagacgcacatttatctccgtaagggccatcctctggctaaaaaagaaagtcttgttatggaggacttggtggccttgcctacagtgcgtttcactcaggagaaggacgagtacctttactattctgaaaactttgtggatacgtcagattcgtctctgatgtttaacgtgacagaccgtgcgactttgaacggtatcttggaacgtacagatgcctatgcgacgggatctggtttcttagatgcgcaaagtgtgaacgggattacggttattccgcttgaggataatttggataataagatggtttatgtccgccgtaaggggattaacttgtcatcttgtgctctcaagtttgtcaatgttatgtttgactactttgatacatacaaaccgtaggaggacttatgcgtaaggttgcgattcctttggctatcttggctctgattggtttggatcagtgggttaagcattgggttgtggcaaatattgcccttaaccaagttatcaaggctattcctggacttttcagtttgacctatctacaaaaccgtggtgctgccttttcgattttacaggatcagaaatatttctttgtgattttgacggttctagtgattggtgcggctctggtttatctggttaagaattaccagaagagtctttggctggtactatctttggttttgatcatctctggtggtattggcaactttatcgaccgtgtgcacttgggttacgtggttgatatggttcagcttgattttattgattttgcaatatttaacgtggcagactcctatctaacggtaggcgtgctgctcttgattttaatcttatggaaagaggaaaatggaagtcatcattaaagaggcgggaaaccgtctggacaaggctttggcagatttgacagaattgtcacgtagtcaggccaatgaagcgattaaggctggaacggtcttggttaatggtaagtcggcaaaggccaagtatgcggttaaagagggtgatgttatcacctatgaattgccagaagaagaggttttggaatacaaggccgaagatattcctttggatattatctatgaagatgcggatgtggcagtggtcaacaagcctcaaggcatggttgtccatccatcagctggtcatacatctggtaccttggtcaatgccctgatgtatcatgtcaaggacctctcgtctattaatggtgtggttcgtccagggattgtccaccgtattgacaaggacacgtctggtctccttatgattgctaagaatgataaggcccacaatgctttggcggcggagcttaaggataagaagtcccttcgtaagtatgtggctatcgtgcatggcaatctacctaacgatcgaggcgtgattgaggctccgattgggcgttcagataaggaccgcaagaagcaggcagtcacagctaaaggaaaacctgcagtaacacgatttaccgttcttgaacgttttggcaactatactttggtagagttgcagttggaaacaggtcgcacgcaccagattcgtgtgcacatggcttatatcggtcatccggtggcgggagatcctctttatgggccacgcaagaccctcaagggccatggccaatttctacatgctaagacccttggtttcacgcatcctacgactggagaattggtcgaatttacagcggaagaacctgctattttcaaggaaaccttggagaagttgagagaagcgtaacagttattaaacggatagtctttcttgggaggggcgtccgtttttttcttgtaaaagagtctgaaatttgctataatttacctaattaaataagtcctttaatcactgtccagagaggcaggcaaggagccatgagaagtgtacgggtgaactgtactcatatttttgtgtatctccttgttttcgaggggatttttttgtatttagaaaggttctttttatgaagaaaaaagagatcgtcgatgacgtaaccatgaaacgtgccattacacgtatcacttatgagattattgagcgtaacaaaaatctcgacaagattgtcttggctggtattaagacacgtggtgtctatattgcacagcgtatccaagagcgcttgaaacagttggaaaaccttgatgtgccattgattgagcttgacactaaagctttccgtgatgatgttaaggctgagcaagatacatctgttttccctattgaaattgatggtacagatgttatccttgtggatgatgtgctttacacaggtcgtacgattcgtgcagctattgataatatcgttagccatggacgtccggcgcgtgttggtttggctgtcttggttgaccgtggtcaccgtgaattgccaattcgtgcggactatgttggtaaaaatatcccaacaagtgagtcggaagaaatcgaagttttggtcgcagaagttgatggcaaagatagcgtcaacattatcgatccaagctgatttgactgacggatagggtaatatgccctttgtatcttacttaactgaacacgggctaagagctgtgtaaaatagataaatcttcctagaagctaaagcttcggcgtcagatttcctaattttactttgctctttatacgccctttgtatcttgttaattgaacacgggactcatttcttaggaaaaaagataagtctcctagcactcttgggagtgcgttgtcgacttcctatttttctacagaaatgtttggctaagccaaagcgtccctttgtatcttaattttaaggagtcctttgatatcgtgaataacgtaaaatatgatgtgaatgatatgccaaaacctggtttattggttggtttgtcattccagcacttgtttgctatgtttggtgcgacggtgcttgtgccgattttggttgggattgatcccgctattgctcttttctcatctggtttgggaactttggctcacttgacggtgaccaagtacaaaattccagcttacatgggttctagctttgcctatattgcggctatgcagacacttatgaagactgatggaattgcggcggtggctcaaggtgccatggctggtggtttggtttacttgcttgtggctctgattgttaagtatgcgggtaaagactggattgataaggtccttcctccaattgtggttggtcccattatcatggtgattggtttgaaccttgcagccaatgcagtcaatgatgcgacaactttgaacaaaagctatagtatctatgctctcttgatttcgatggtgaccctctttgcggttatcctctttaacatgtatggcaagaagattatcggtgttatcccaattttacttggattaattgtgggctatactttctcagcggttcttggtttgctgacaggacatagtttcatcaatttctcagaggtagcagcggcacattggattcaagttccaaactttgacattccatttgtggattatagctttaagctctatccaagtgcgattttgaccatggctccgattgcctttgtgacgatgactgaacactttggtcacgtcatggttctaaacagtttgactgagcgtgattacttcaaagatccaggacttgaccgtacccttactggtgatggtttggcacagattatcgctggattctttggagctcctccggtaacttcttatggtgaaaatattggggttatggccctcagtaaggtctactcagtttacgttattgcgggcgcagcagtgattgcggtcttgatgagctttattggtaagctatcagcactcttgcattctattccaactcctgtattgggcgggttgtctattgccctctttggggttatcgctgctagcggtttgaaaattttagttgaacataagattgattttgataataaaaagaatctcttgattgctagtgttatcttggtatctggtatcggtggtttgatgattgaccttggtggtcttcaaattacgggtgtggcaagttcaaccattcttggtatcttgctttaccaaatcttgccagatcctaaaaaaggtagcaaagattagtcaatcaatttaaaaggaaaaactatggcgattgcagatggaaaagtgtcactgaaacatttggtgacaatggaaaccctcacgaatgaagaggtcttgggcctgattcgtcgaggtggagattttaaaaatggcagagctgatttccagctggatcgacagtatttcgctgccaatctcttttttgaaaattcaacacgaacgcacaagtccttcgaagtggctgagaaaaagcttggcttggatgtgattgagttcgatgctggaactagctcggtaaacaagggtgagaccctctatgacacgatcttaaccatgtctgctttgggcgtggacatctgtgtggttcgccactcggaagtcgattactacaagcagttgattgatagtaggaccatccagacctctattgtcaatggcggtgatggttcagggcaacacccaagtcagtgtttgcttgacttgatgaccatttatgaagagttcggaacctttgaaaatcttaagatttgtattgcaggtgacattacgcattcgcgtgtcgccaagtcaaatatgcagattctcaagcgtttgggagctcagctttattttgctggtccggcagagtggtactcgaatgagtttgatgtttatggtcagcatgtggctattgacgacgtcattgaggacttggatgtcctcatgttgcttcgtgttcagcatgagcgtcatggggatgacaaaggattttcaaaagaagactaccatgctctctatggtttgactgaagaacgttatgccaagttagctgatcaggcgattatcatgcaccctgctccggttaatcgtgatgtggagattgctgatagcctggttgaggcgcctaaggctcgtatcgttgctcagatgcaaaacggggtctttgtccgtatggcaattattgaagctattttaaatggcaaagcgtaaacaacgttaaccgattcctgagagaatcagacgaaaaagaacatgggctaaatctttgaaaagagacaaatcttcctagaggctggagcttctctgtcagatttgcttttcattcagattttaacgccccttgtatcttagtgaaaggaacaatttactataatggcaaaacgtttacttattttggaagacggcactatttttgaaggtcaggcctttggtgctgatgtggatgtgacgggtgaaatcgtctttaatactggtatgacaggttatcaagaatctatcacagaccagtcttacaatggtcaaattttgacttttacttatccacttgttggtaactatggtgttaaccgtgacgactatgagtcaattaagccaacgactaagggtgtcgttgtgtcagaggctagccgtcgtgccagcaactggcgtaaccaaatgaccttggatgagtttttgaaggcgaaaaacatccctggtatctctggtattgatacacgtgccttgactaagattatccgtcaacacggtaccatgaaggccactttggccagccctggtgacagtatcgagcacttgcaagatcaattgcgtgcgactgttttgccaaccaacaatattgagcaggtatcaactaagacagcttaccctgcaccaggtgttggtaaaaatatcgttttggttgactttggtctcaagcactctatcttgcgtgaattttcaaaacgtgattgtaacgtgactgtggtgccacatgatatcactgcggaagaaattcttcaccttaatccagatggtgtgatgttgtcaaacggtccaggtaaccctgaagatgtaccgtacgcacttgatatgattcgtggcattcaaggtaaaattccaatctttggtatttgtatgggtcaccagttgtttagtttggctaatggtgccaaggcttacaagatgaagttcggtcaccgtggatttaaccatgcggttcgtgaaattgcgactggtcgtgttgatttcaccagccaaaaccatggttatgccattgaccgtgagtcacttccagattgcctcatggtaacacacgaagaaattaacgataagtcagttgaaggtgttcgtcaccgtgacttccctgcattctcagtgcaattccacccagatgcagctcctggtccacacgatgctagctatctctttgatgagttcttggaattgattgatgctttccaagctgaaaaagcacgtcgttaattgcaactgtctagtgactatagtggggtgtgactcttgttcgccccagtctactaccttatttaatgacaaccagagagttgtcaaatagaaaggagaagatacaggttcacggaagtgaacatgccctaaggactgtgtgaaaaagataaacgatgactagacgcttgggcgtcgtcgtcacgtttcctattttcactggggccttaacgggctttgtatcataaattatgcctaaacgttctgatattaaaaaaattatggttatcgggtctggtcctatcatcatcggtcaggctgctgagttcgactatgctggtacgcaagcctgcttggccttgaaagaagaaggttacagtgttgtccttgttaactctaaccctgcgacaatcatgactgataaagaaatcgcagacaaggtttacattgaaccaattacgcttgaatttgtcacacgcattcttcgtaaagagcgtcctgatgccctcttgccaacacttggcggacaaactggtttgaacatggcaatggaattgtcaaaagctggtattcttgaagagcttggagtagagcttttggggacaaaattgtctgccatcgaccaagccgaagaccgtgacctcttcaaacaattgatggaagatttggaacaaccaattccagaatctgaaatcgtcaatacagttgaagaagcagttgcctttgcgtcagaaattggttacccagttatcgtgcgtccagcctttacccttggtggtactggtggtggtatgtgtgccaacgaagaagaacttcgtgaaatcgctgaaaatggcttgaaattgtcaccagtaacacaatgtttgattgagcgttctatcgctggtttcaaggaaatcgaatacgaagttatgcgtgatgccgcagacaatgctcttgtggtatgtaacatggaaaactttgacccagttggtatccacacaggggactcaatcgtatttgccccaacgcaaaccttgtcagatattgaaaaccaaatgcttcgtgatgccagcttgaagattatccgtgcccttaaaattgagggtggctgtaatgtacagttggctcttgaccctaatagcttcaagtactatgttatcgaagtaaaccctcgtgtatcacgttcatcagcccttgcctcaaaagcaactggttacccaatcgccaaattggcagccaaaatcgctgttggtttgacacttgatgaaatgattaacccagtcactggtacaacttatgccatgtttgaaccagctcttgactatgtggttgctaagattccacgtttcccatttgataaatttgaacacggtgaacgtcgtcttggtactcagatgaaagcaacaggtgaagttatggctatcggtcgtaacatcgaagagtcacttcttaaagcctgccgttcacttgaaattggtgtttaccacaatgaaatgcctgagcttgcggacgtcacagatgatgctttggttgaaaagattgtcaaagctcaagacgaccgtctcttctacctttctgaagccatccgtcgtggttacactattgaagaattgtcagagttgactaagattgatatcttcttcctcgacaaattgctccatatctttgaattggaacaagaattggctactcacgtaggcgatgttgatgttctgaaagaagctaaacgtaacggtttctctgatcgtaagattgctgatctttggaatcaaacagctgaccaagttcgtgcgacacgtttggaaaataacattgttcctgtctacaagatggttgatacctgtgcggctgagttcgagtcatcaacaccgtatttctactcaacttacgagtgggaaaatgaatcaatcaaatctgataaagaatctgtcatcgttcttggttcaggtcctatccgtatcggacaaggggttgagtttgactatgcgacagttcactctgtaaaagctatccaggctgcaggttacgaagctatcatcatgaactctaaccctgagactgtttcaacagacttctcagtttcagataaactttacttcgaaccattgaccttcgaagacgtgatgaacgttatcgaattggaacaacctaagggtgtcgtggttcagtttggtggtcaaacagccatcaacttggcagagccattgtctaaagctggtgtgaaaatcttgggtacacaggttgctgaccttgaccgtgccgaagaccgtgacctctttgaacaagcccttaaagacctcgatatcccgcaaccaccaggacaaacagcgacaaatgaagaagaagcggttgaagcagctcgtaagattggtttcccagttcttgttcgtccatcatacgttttgggtggacgtgccatggaaatcgttgaaaatgaagaagaccttcgttcttacatgcgtacagccgttaaggcaagtccagaccacccagtccttgttgatagctatatcatcggacgtgagtgtgaagtggatgccatctctgatggtaaggatgtcttgattccaggtatcatggaacacatcgagcgtgcaggggttcactcaggggactcaatggcagtttacccaccacaaaccctttctaagaaaatccaagagactatcgctgactacactaaacgcttggctattggtcttaactgtatcggtatgatgaacattcagttcgttattaaggatgaaacggtctatgttatcgaggttaacccacgtgcaagtcgtaccgtaccattcttgtctaaggttactgatatcccaatggctcaagttgctacaaacttgattcttggtaaatcattggctgagcaaggttacaaagatggtctttacccagaaagcaaccatgtccatgtcaaagcaccagtcttctcatttacaaaattggctaaggtagatagcctccttggacctgaaatgaaatcaactggtgaagttatgggtacagatgcgactcttgaaaaagcgctctataaagcctttgaagcatcttacctccacttgccaacctttggtaatgttatctttactattcatgatgatactaaagaagaagcccttgacttggcccgtcgtttcgatgctatcggttatggtatctacgcgactgaaggaacagctaagttcttgaacgaacacggggttcacgcaacgcttgttaacaaattgggtgaaaatgatgataatgacattccagccctcgttcgtacaggtaaagcacaagccattatcaatacggttggtaacaaacgtacttatgatgaagacggagcagctatccgtagctcagctattgaagctggaattcctctcttcacagcgcttgatacagcagatgctatggtgcgtgtgcttgaaagccgtagctttacaacagaagctatctaatcatgaaatagagtctcagctttgctggggcttttttattgaagacaaagttttcttttgagacttttcttaagtgatgacggacatcagcgaccttctgcgaagttccatgactaagttttgagccgaaagtctcaaaacttccgaacgcctgaaactaatcgtttcagacgtttttatcactgcgaaaagtctcggtataagcttactaggttcgcaaaatctatttcatatttaaaaatagtttaattatgttctgagtctcagccttgctggggcttttttcttacacaaatgtaagctaacaaattaaaatgaaagctaagactatggttttgtttcctaagattctgctatactagaaacatgattattaccacatctttacgtgaaaacgagtccttaattgcgcgtgctcaagaattagccctggagctaggagttgactaccagcctcgtcgcaagttatccttggcaaaatgtttagagcgatttggagctttttatcttctatataaagacagactgtcttttgtcaatgcggatggaagtgagctatcctttcatccagatacagcagttcttaggattaaggcaccacatgatgctttagtcaatcttttgggtccgtcttccaagtctattctcgacacgaccatgggtctggcttccgatagtttagttatggcggcagtgggaaataaggtgactgcccttgagagtcaagaagtgatttttcaggtggtttctcgtggtttggccgcatatcagacagatgaaaagaagcttgaaaaagcgatgcggtctattaagacaattaagagcgatagcttatcctttttgaaatcccaggctgatcactcttttgatatcatttatgctgatcctatgttttcagagactatcaaggaatcggaaaatctacaagctatcaaacctttggccaatggcagccgtctgacagaagaatggttaaatgaggctaagcgtgtcgcacgagaaaaaattatcatcaaggcgcattttcgagataccgtttttgaggaacttgggtttgaacgtcagattcgtcccaatcaaaagctgcactatggtgtcatgtatttaagcgaaggccattgacacagaaagttaaaagtattacaattgttttatttatgtgatacaaaagaaaagagagacttatgcgaaagaaaatcagtccaaagttatttaaaaataaaaaaagagtttggatcattggaggaattggcttccttgtccttttggtcctaggttttaacctttttgcaggtggtggcaaagatgataaggcttccgagtcccctacagcaagtaaggtaaccaaggggcagttggcctcgtccacccttctgactggcatggtgaaggctcagtcagaacagtacgtttattttgacaataccattggacgcaatgccactgtgacagtctctgttggtgaggaagttagcgttggtcagcaactggtccaatacgacagtacctctgcccaagcagcctatgatacggctagtcgtgcctataataaggcagttcgtgaccgtaattatttccaacagtatgggacagctcctgcggcttcggcacaaacaagtagtgattcggatgaggatgattcgacgactaccgttagcccacaacagcgtcagcaaaccgaggcaagtaattaccaaaccttgcaagattataatgatgctgttgctaacgcagcatcagagctagaaaaggcacaagacgtcctcaaccaaacggtcattgtttcagatgttaatgggacagttgtagaagttgcggactctgtggatcctgcttcaaaagagagccagactctagttcatgtgaccagtgaaggccaatttgagattcaaggaaccttaacagaatatgacattccaaatatttcagtaggtcaaaaggtcaaaattacttccaaggtctacccagaccagacttggacagggaaagttagctacgtttccaattatcctaagcaaaatgccagtcagtcagcgggtacatctggcaactcaggacagacaggctcccagtatgaatacaaggttcaattaaccagtcctataggcaagctcaagcaaggcttcaatgtatctcttgaagtaaccaaagatgatgatgccctgttagttccagtaactgctgtgaccaagaaaggctctgacaactacgtctgggtttacgatgacgagagtcaaaaaatcaagcaagtcaaggtcaaacttggtaatgcagatgctaagcagcaagaaattgcatcagggcttaaagaaggtcaaaaggttattactaaggctgaaaaatccttcaaggatggtgagacactaaaggatgtgacggatgccgatagcaaaaaatcaaaagagactagtggagaagaggtgaagtctagtgactaagccagcacttatggtcttaaaaggcatcaccaagtctttcaaaaatggtcaggagtccttgcaggtccttaagggaattgacttatcagttgatgaaggtgacttcgtggcaatcatgggtccttctggttcaggaaaatcaaccctcatgaatattattggacttcttgatcaaccgactacaggttcctatcaactcgagggagagaatgtagctgagctctctgaaaaccgcttggccaaggtaagaaatgaccagattggctttatctttcagcagttttttctcttgccaaagttaagtgcccaaaagaatgtagagcttcccctgatttatgcggggaaatctccacgtgaacgtaagcaaagggcacaacaattcttgaaaaaagtcggcttgtcagaccgtagccatcatttgccgtcagagctgtctggtggacagaagcagagggtggctattgcgcgtgcactgtctaacgatccggcaatcattttggcggatgaacctacgggtgcacttgataccaagacaggaacccagattatggatctcttaacccagctaaaccgtgaaggaaagaccattgtcatggttacccatgaaccagagattgcagactatgcccgacgtaagattgtcatccgtgatggggaaatcacccaggatacgacggatagcgttcggatagactaggaggtaagaatggaaaattggaaatttgctcttagttctattcgttcacacaagatgcggtccttcctgaccatgttggggattatcattggtgttgctgcggtagtactcattatgggtctaggaaatgggatgcgtcagagtgttaccgatagtgtgacaggtgataaggatactgttcaagtctactatgaagccaagggtgaggagctagatcctgcctatgcggacctgtcacaaccgaccaaaccggttaaagaagtttggttggagcaagtggctaggcagacgcctggtatcgatagttattttgtgactaacagcctaacttcctctatctctctccaaaaaaagactgtgaagaacgttaatatcacaggtgccagtcagggctactttaaagctaaaaagttagagatgttgacaggacgttccttgcaagacaatgactacaaaaacttttcgcgcgtcattgtcattgatcagatggtggctaagaaactatttgaaacgaatgaggatgcccttaaccaagtggttactattggaaacaatgattatcgtgtgattggtgtttataagaataaagacacagcaattggtgcctatggtgaaattggaacagctcttgtggctaatacccagttagcagctgagaataataccgatgctattggccagatttttttccatgtgaccgatgtgaaaaatagtagtagtgttgctaaggatgctgctaaacgcttgacccagttggcccaagatgataacggggagtacaaggcagcagatatgagctcgaccttagatcaggtgaacacaatctttggaaccattaccaccgttgtcggagctattgctgggatttcactcttagttggtggaatcggtgttatgaatatcatgctagtttcggtaactgagcggacacgagagattggtcttcgtaaggctttaggagccacacgccgtaaaatcttgactcagtttttgattgaatcgatggttctgaccatcttgggtggtctgattggtctaggttttgctgccctagttgttgggccaatcgggaatgccatggaccttaaagcgacagtctctcttggcgtagccatgggaagtattgccttctcagcagccgtaggaattatttttgggctcctaccggctaataaagcttcgaaactcgatcctatcgaagctcttagatatgactagacatcacctcttgaaatctttggattttgagaggttttatgcttttcaaaaaagatagcgaaaaaaatcaaaaaaagttgtatttttttcttgacgtctgatttaggtcatggtattatatataaggtttgaaaaaactgacctaagacagttggggagttaaactcataaacatccaaccgaggcacaaaacgtaactatttttttgtaacgtattgtactttcgtgtctaggtttaggtacgatttttttgtgcctagcccaaaaataaaaacggaggtaaaactactaatgagtgaagctattattgctaagaaagctgaacaggttgcgattgtcgctgagaaaatgaaagctgcagcatctatcgttgttgttgactctcgtggacttacagttgaccaagatacagttcttcgtcgtaatcttcgtgaatcaggcgttgaatttaaagttatcaaaaactcaatcttgactcgtgcagctgaagaagcaggtcttgaagaccttaaaggactcttcgttggcccatctgcagtagcattctcaaacgaagatgttatcgcaccagcgaaagttattagcgaatttgctaaagacgcagaagctcttgaaatcaaaggtggtgttgttgacggcgcgttcacttcagtcgaagaaatcaacgctcttgcatcacttccaaacaaagaaggtatgctttctatgctcctttctgtacttcaagcgccagtgcgcaacgttgcatacgctgtcaaagcggttgcagaaagcaaagaagacggtgctgcgtaagcccatcttcacaactcgtagcctaagctacgtttaaaaaaattatattaaaaacacatttggaggaaatcacaatggcattgaacattgaaaacattattgctgaaattaaagaagcttcaatccttgaattgaacgaccttgtaaaagctatcgaagaagagtttggcgtaactgctgctgctcctgtagctgctgctgcagctggtgctgctgacgctggtgctgctaaagattcattcgacgttgaattgacatctgcaggcgacaaaaaagttggcgttatcaaagttgtacgtgaaatcacaggtgaaggtcttaaagaagctaaagctatcgttgacggtgcaccatcagttcttaaagaaggtgttgctgcagctgaagctgaagaaatcaaagctaaacttgaagaagctggagcttcagttactcttaaataataaggtaacgactcaagtcgcttaataaagaaaaccagggcaaaagctctggttttttattgcgataaacgattatgagaaaccgtttgaattaataggttccctaccaaaaaactgccaaatttatttttggcagtttttttatttttctattttagattggttttgtttactatgtcctctacaaggatgtactttaattgtcttataatcgcttttttaggataaaaatatcctatttataggtagaatccagggcatcagctctggttttttctattgcttttaatattttcatttgttagaatgtaggtaatgtgcgtgcttgtcacgccctttttctatgtcttttacggctttagtggttgtaaataactataaaaatcttaaaggcatggtaaatgctaaaaagaaaaggagaaatttatggcttatatttggtcttatctcagacgttatcctaagtggctagcaatgaattttacggcggccattttatttgttattgctaacttgggtttgccgacggttcttgccagaatgattgatgagggaataaaccgtggtgatgttgataagctttacgcttatgcttgggtcatgtttggtgtagttttgactgggattgttggtcgtatacttctgtcctatgcagttggtaagttgaccactactatggtgcaagtcatgcgtaatgacatttatgctaagcttcaggagtattcccaccacgagtatgagcagattggggtatcctctttggtgactcgtattacatcagatgcttttgtgcttatgcagtttgcggatcaggttcttaagctaggggttatcactcctttgatgatggtttccagtgtctttttgattttgacgacaagtccatctttggcttggattgtggccatctccttgcctttcctagccgtagtagtctggtatgtggcggtaaaaacgcgtccgctttctgaaaagcaacaggcaactctcgacaagattaaccagtatgctcgtgaaaatctgactggacttcgtgtcatccgtgctttcgctagagaagattttcaagagaagaagttcgcttctgaaaatgctgtctatgcggataattcaaacaagctctttaaattaactggtttgaccgagccactttttgtgcaaatcatcatcgccatgatagtggcaattgtttggtttgctcttgatccattaggttctgggactttggctatcggtgacttggttgcctttattgagtacagtttccatgcactattgtccttcctcttcctagctaatctttttaccatgtatcctcgtacagcggtgtctagtgaacgtctgcaggaaattatggacatgccgatttctatcaatccaaatgaagatggcgtgacagaaaccgagactaagggatatttggaatttgacaatgttacctttgcctatcccggtgaaactgagagtcctgtcctacacaatatttccttcaaagctaaaccaggtgaaaccattgcctttattgggtctacgggttcagggaaatcatcacttgtacagttgattccacgcttttatgatgtaacacttggacgcattcttgttgatggtgtagatgtccgtgactacaatcttaaggctcttcgtcgtaagattggctttattccacaaaaagccctactctttacagggactatcggtgaaaatatccgttatggtaaggaaaatgccagtcatgaagaattgaatcaagctactgatgtggctcaagccaaggaatttatcgaaagtaaggaagaacgctatgattctcacttggctgagggtggtagcaacctttctggtggacagaagcagcgtttgtcaattgcacgtgcggtggttaaacgtcctgatctttatatctttgatgattccttctctgccttggactacaagactgatgcgaccttgcgccgtcgtctaaaagaagtgactcaagatgcgacagtcctgattgttgcccaacgtgtgggaactatcatggatgctgatcaaatcattgttttggatgaaggtgaaatcgtcggtcgtggccgtcacgaagagcttatggaaagcaatgagatttaccgtgaaattgctaattcacaattgaatcaaaagagtcttacggaagactagaaggaggtcaaaatgaagaaaaataaaatgaaaataagtcattcctcaagttttggccgcctttggtcctacttgcaggcttatcgtttcccactttacctagccattttcctgaaaattgttagtgttatcatgagtgtccttgagccagtggtcattggtttagctattaccgagttaactaaaaatacgttggccatcatcaaaggtgtggaaggcgctcatatcaacgtttcctatgttggtttggttttggttgtttatctcttgcgtggtcttatttatgagttggccgcctactattccaactttttcatgaccaatgctgtgcaagcaacggttcaagatatgcgaaatgagatgaccgagaaaatcaatcgtacctcagtgtcatactttgataagcaccagtttggagacctcttgggacgctttaccagtgacgtcgagacagtatctaatgccttgcagcagtcattcttgcaggttgttaatgccgtctttactctagccttggttattggaacagtactttaccttaatcttcaattgggagctatagttgtcatcactattccgattacattctttggtgcccgctttatcatgagtaagtctcagccctactttaaacaacaggctgatactctaggtactcttaatggttttgttcaggaaaatctgaccggcttcaatgtgcttaagctatttggccgtgaggatagatccttggacgactttaaagaaatcacggaagaccttcagaaggtaggctttaaggctaatttcatttcaggactcatgatgccggttcttaatggtttatctgacttgacctatctaattgtcgctgttctaggtggtttgcaagttttggctggtcgcctaacgattggtaatatgcaggcctttgttcagtacgtttggcagattaatcaacctattcagaacttgactcagttggctggacaattgcaaagtgctaaatcttctttggaccgtattttccaactgatggatgaaccagatgaggctaatgatgctactgaggtgcttgaaggagatttgactgggcaagttagctttaagcatgtggatttccagtatgtggctgataaacctttgattcgtgactttaatcttgaggttaatcctggagaaatggtagccattgttggtccaaccggtgccggaaaatcaacgattatcaaccttctcatgcgtttctatgatgtgactgccgggtctatctcggttgacggtcatgatatccgtaacctgtctcgtcaggattatcgtaaacagtttggtatggtgcttcaggatgcttggctctttgaaggaactatcaaggaaaatcttcgctttggtaatcttgaggcaactgacgaagaaattgttgaagccgctaaggcagccaatgtggaccactttatccgtacactacctggtggttacaacatggaaatgaaccaggaatcaagtaatatctcactaggacaaaagcaacttttgaccattgcgcgtgcgcttttggctgatcctaaaatcttgattttggacgaggcgacctcatcggttgatacccgtctggaactcttgattcaaaaggctatgaagaccctcatgcaaggtcgaacaagctttgtcattgcccaccgtctgtcaactatccaagaggcagacaagattttggtccttaaagatggtcaaatcatcgaacaaggtaaccatgaatccctccttgcagataaaggtttctattacgacatatataatagccagtttgcggagaaataaacaaaaaaatccatcagttcataactggtggattttttctgaattttatgtgactttaagtccgtttcgctccaaaggtgcgaaacaaataaaccacccgctatgcgggtgcgcatcgaaggttataccgtcataacaaaaaaactccaaacgagttacaatataggtgttcaagccaattgtaaaacgaaaggagttaagactatggcgcaaaaagctcacagtttatcacatacaaaatggatgtgtaagtaccacattgtatttacacctaagtatagacgaaaaataatctataatcaatataggagtagtctgggagagatttttcatagactatgccaatataaaggcgttgaaataatagaaggtcacttaatgccagatcatgttcatatgctagtgagtattccaccacgaatgagtgtagctagttttatgggatatttaaaaggtaaaagtgcattgatgatgtttgataaacacgccaatttaaaatataaatttggtaacagacatttttgggcagaaggttattatgtaagtacggtaggacttaatgaagccacaattaagaaatatattcaggaacaagagaagcatgatatcgctttggacaaattaagcgtaaaagaatatgaaaatcccttcagggataatggtaagtaatgcgaatgcctctttgagaggcttgtgacgagtcaaaagcaataaggcttgaacaaagtgaaagccagcgtctttaggcgctggctggtattatgggcttatagcccatgatcaaaccacccgttagacgggtggttatgatttgacgagcaataaaagagacttccccggaaagagaagtctcaaaatcaatattatttttcagcacgtcgtgtgacgaacatggcatctccgaaactgaagaagcggtagtgttcttggacggcgtgtttataggcatcaaggacgaattcacggccagcaaaggctgaaaccaacatcaccaaggttgattttggaaggtggaagttggttgaaaaggcatctacgactgtgaattggtagcctggtttgataaagatattggtccagcctgagtcggcttggagttgaccatcgtatttattgccgattgtttctagtgttcggatagaggttgttccaactgcaatgatgcgccctccagcggctttgacactattgagtgtatcggcagcgtcttgactgagggtgtaaaattctgagtgcatctcatgttcgtcgacattatcgacagaaacaggtcggaaggttcccagtccaacgtggagtgtgaggtagaccaattttacgcctttagcttcaatcttttgaagtaattcaggagtgaaatggaggccagcagttggagcagcggcagagccattttccttggcatagaccgtttggtaacggtcgcggtcttccaatttttcatggatataaggtggcaatggcatctcacccaagctttccaaaacttcaaggaagataccgtcgtagctaaattctacgatacggccaccgtgatctagttcctcagtgacactggcagtcaaacggccatcaccaaaactgactttagcacctactttaaggcgtttggctggtttggctaaaacttcccattgatccccttgggtattttttaaaaggagaaattccacatggccgtgggtatcaggcttttcaccgtagaggcgggcaggaagcacgcgcgtattgttcatgaccaaggcatcgccagggttaagctggtcaatgatgtggtcgaagtgggtatcagtcatttccttggttacaggatcaatgaccaagagtttagaggcgtcacgttgttccaatggggtttgggcaatcagttcctctggtagttcaaaatcaaaatcgtttgtattcatttgtttcctcttttaaaaattttcagcctttttattatagcacgatatagggcgaccgtcattaaaggagttgagtgaaagcgcttgacaaaaaggttaaaaaaagagataataaagaaaatggtatataccaatatcgaggtgaatagaatgaaaaagattttagttaagaatcaagttgagggaggccaagttgcctttgatcttcttaaagagagccttgtagcaggtgctcaaacattgggcttggcgacaggtagttcccctatcgccctttaccaagagatggttgaaagtgacgtggatttttcgaaactttacagcgtcaatttggatgagtacgtcggactagcaccagaccatgagcagagctatcatgcctttatgaaggctcaactctttgatgccaagccatttaaggagagcttcttgcctgacggtatggctgaggatttggagcaggcggctaaggattacgatgacgtcttggcacaacatgccattgacctgcaaatcctaggcatcggaagtaatgggcacattggttttaatgagccaggtacgccttttgatagtcaaactcatgtggtcgacttgactgacagcaccattgaagccaatagccgtttctttgctagtcgtgatcaagttcctactaaggctatttcgatgggaattgcttctattatggctgccaagaagattatcttgtttgcctatggtgacaagaaggcagatgccattttcaagatggtcaagggtcctgtgacagaggaagtcccagctagtgtcctacaaaatcatccagatgtgactcttatcctagatgaggcagccgctgcgaaattgtaatactatcttttgaaaaacaatcttacgaaactcaggttgaggcatttggcgctcagcctttttcttttgtgaaaagtcacttccaagcaaatcaattgcctagccctctttgatagcgctataatagttaagttgactttgactatcaaacaacagatatagatatttcataaagaaagaggacatacaatggcaaaacctattcgagtattgctttattataaataccttcccatcgaaaatgctgagcaatttgcggctgatcacttggctttctgtaagtcaatcggtttgaaaggacgtatcttggtcgctgacgagggaatcaatggaacggtttctggtgactatgaaaccactcaaaaatacatggactacgttcacagccttccagggatggaggacctctggttcaagattgatgaggaagaagagcaagccttcaagaagatgtttgttcgttacaagaaggaaatcgtccaccttggtttagaggatgacaactttgatagcgacattaatccacttgaaactacaggtgcttacttgtcaccaaaagagtttaaagatgctcttttagatgaggacactgttgtcctcgatacacgtaacgactatgagtatgaccttggtcacttccgtggagccattcgtccagacattcgcaatttccgtgaattgccacaatgggtccgtgaccataaagaagagttcatggacaagcgcatggttgtgtactgtactggtggtgtccgctgtgagaaattctcaggttggatggtccgtgaaggctacaaagatgttggtcaattgcacggtggtatcgcgacttacggaaaagatccagaggttcaaggggagctttgggatggtaagatgtatgtctttgacgagcgtattgccgttgacattaaccatgtagatcctgtcgttgtcggtaaggattggttcgatgggacgccttgcgagcgctatgtcaactgcggtaacccattctgtaaccgtcgtatccttgcttcagaggaaaatgaagacaagtacctccgtggctgctcacatgaatgccgtgttcacccacgcaaccgttatgtctctgaaaatggtttgagccaagaagaagttgtcgaacgtcttgcggcaattggtgaaagcttggatgtaaaccctgcttaagtttaaagattgaagaagctgagaagaatctcggctttttattttgtaatttatttctaaaattatgacacatatatattgcaattagaaatatatagtgtataattaaggtgaaaacagatggtgaatctaattgatgtcgacgataatatcagatatgatgtaaaggaggggcatgtggcaaagaatttacgtttaaaagcagctcgagtagagcatgatatgacccagggtgacttggcagaagctgtaggtgcaacaagacaaaccataggtttgattgaagctggaaagtacaatcccagcctagccttatgcattgctatttgtaaaacactagacaggacgttggatcaactgttttgggagatttagaaaggaagtaaagatgatgaaatttaagctgattgataataaggttacagacgaacgcgaaaaagctctaaataataaagttggtgccgaatgctattgcataatgattgcagggatgtttgtatacttagtttatggctccctctttaacaatggtgtcatccctgctgattacttactttatccattattgatagcatggatttggtctggttatagagctgaacgtcttgctgtaaatgcttttggtagttcgagtatgacagtcctaggttgtttactggcgactgggcttatcactcttataattatgatgactaactatcggtacaaccacaatgtttatcataataatcccttggatcctagatatctcatgacttgggcaggtacttatatgttgtatgctccctttgtcttttttatgaattgggctctcgctgcacttggaagatatgcgagaaagcatcttgaaaaacaactagacgatttggaaaatgaagaataaatagtgttagaatcagaccgttctttttggtctgatttttttgtgttataatgggtcctaaaactaaggaggtcacgtatgctactaactgaatttgatgcgaatagacaagcgattatcaatcccgaggacttgaatgagcctcttgaggggtttcctaaaatagctgtatcctgtttttctcgttcgacctttcaacgaatgcttgagatgtttcctcatgaacttatctatgaaacgtccatggcgaatgtggctattccgatatataagcttgttattgatgagcaggagttggctctttttaatgcacctgtaggtgcctctgcctgtgtggctattttagaggatatttttgctttgggaactgataaactggtgctctttgggacttgtggggtgcttgatgaagatattaaatagacttctattattatccctagtcatgctcttagagatgaaggaacgagttttcactatgtggaagctagcaatgagattgcggtaaatgtgggtgttttagcttgttttcgttcctatctcaatgagcgtcagattcctcataaggaaggcaaggtctggacaactgatggtatttaccgtgagacgagtgctaaactcaaagctcgaaaggcagcaagggccatttgtgtggatatggagtgctctgcagttgcagctttagcaaagtttagaggtgttgaggtctgccacttcttctatgctgcggatcacctttctgaaggtaattgggacgctcgtaacctgatgaatcatgcagatttggatgaaaaggacaaggtagctttattagctttggagtttgcgtgtgactggagtaaaccttaaaaaatcctacttttcaaccttcttatttgtaatcattctaaataactgttataatattttttagaatgattctaaataaggagtgaataaattggaagataagaattttgcagagcgtttaaatattttgagagctggtgttttaggtgccaatgatggaatcatttccattgcgggagtggttatcggtgtggctagtgcgacatcaaacatctggtttattttgatttctgccttgtcagccatttttgccggtgccttttcgatggcaggtggcgaatatgtcagtgtctcaacgcaaaaagataccgaagaagctgccatcgctaaggaacaagctctcctggatcgctcacctgaagcagctagagagagtttgtaccgaaccttcctcagtcagggggattgcgaaacagcagccgaagtcaaggtcaatcaagccttcagtaaaaatcctattaaggtcttggttgaggaaaaatatggagtggacttggatgaaattaccaatccatggcatgctgccatatctagtttctttgctttttcggttggttccttgccaccagcactagctatcatgcttttcccagagccttaccgtattcctgtaacagtggtcgtggttgcactgactttgctcttgactggctatattagtgccaagctcggaaaagcacctattaaacaagctatgttgcgtaatttgacagtaggactcttgaccatgcttgtgaccttcttggttgggcatatcttccatgtgaatgtgtaagtgttaataatggataggtctaccatgttaggtgggcttttttagtctgctagactaagcttatccgtggtacaatagggttatgcgtttagataaattattaggacaggcgggttatggttctcgcaatcaagtcaagaagcttattcgtagccgtcaggtatacgtggatggcatcttggctgaacaagataatcttaatgtggatgctagtcttcaaaccatcacggtttctggtaaggaactggagcatgccccagaagtctactaccttatgaataagccgtcaggggtggtgtcagctcgaaaggacaaggaacaccaaacagtcattgatttgattaagcctgaagatcagcgagaggggctttatcctgttgggcgattggatagagatacggaaggattggtgctgattactaacaatggtcccttgggctttgccatgcttcacccacgctatcatgtggctaagacttattatgtcgaggttaatgatattctggggcctgatgcacctgcattttttgagtctggtgttgtttttgaagatggtactgtttgtcaatcagctcagctagaaattttaagttctgcgagtgataagagtaatgctcatatcacgatttcggaaggtaagtttcatcaggtgaaaaagatgttcttggcttatggggtcaaggtgacttatcttaagcgtatttcttttggagcgtttaagcttgatgaagggatagcagtaggatcctacagagccttaacggaagcggaaaaagtgattttgcgtacttatctgggctagtcatttcttcttattaagctatgatagggactttcaatctcctgataggtccatcctatcactaggcttgatactgtaaggcccataaggacggacttttctaggggtataaataaaatttatgacattctataagtttttttaatttttcaagccttgtttctggtggtatgatggtatcaattcgattgagaacttaagtaagtcagggcagtgagcaggtctaatcagaaagggaggttcattatgacagaagcattttatgatcatttagcaaagacacgtcatcagattcaccaacattcagaggtttctgaggaggagcatgagacgacagtctttttgaaaggttatttgaaaaatctaggtattgagcctttaaattatcccctgaagacgggactcatcgctgagattgggtcaggtcatccgattattgctttgcgtgctgatattgatgccctaccgattaaggaaaagacaggacttccttatgccagcgacaatggggctatgcatgcttgtggtcatgattttcaccaaacctctctacttggagccgctcagcttttaaaagaaagagaagcagagcttaaggggaccgttcgattgattttccaaccagccgaggaaaatttccaaggggcctatcaggtcattgaagcgggtggtcttgatggtgtgtcagctatcatcggttatcacaataatcctcacttgaaacctggtcagattggtcttcgttcgggggctatcatggctggtgtggagcagtttagggttgatgttaagggtgtttcttcccatgcggctcgtcctgatttgggtgttgatacggtcttggtcactacgactattatcaacaacttacagcagattgtggctcggacggtatcgccctttgaatcagcagtattgtcagttactcatatcgaagttggaaatacttggaatgttcttccagcagcaggcttttttgaaggaacgattcgtacctttgagcctaaggttcgtgaagatgtcattgctcgttttgaaaaggtcgttcaggcgacagcagaccagttcggtgctcaagttgacattacttggggcaattcaccttatgtgacctacaatgaccatagtctcacaccactcatctttgaaaattctaaggccttcgcagaagtgattgaaaccttgccatcaacagggggcgaagactttgcggcttatcaaaaggaaataccaggagtctttgcctttgttggctcaaatggtgaagagaatgcaccagactggcaccatgatgatttccttgtgaaagacgaggccttgccagtagctgtgaattactatgtggaaaacgccctctttctacttgactattttaaggagcaagaaaaataaccattcccttaatcggtattaccagtaatgaaaaacctgtcgaagaaggaagtcctatttataggtgttcagtggcatcctgagtttctcttgggacataagcaattagcagaccaaggactctttgattattttgttaagagttttaaataaggttttaggattttacattggtgccacatttgaaattgaaaaggaggacgtgcttaaggagaaatattcttttgatcatttagtttacacttaagaacccagccgattggttgggttcttttgtcgtattttagaagcaagatttcaggacttaaaaaggggtgagaatttttcacttgctatttttaagctttttagataaaatgaaagcgttatcattttaaaaaaatagataggaagtggttaagtcatctttatgatgttttaccttataacttccgaataaggagaaacgtatgttaattggtattccaaaagaaatcaaaaataacgagaaccgtgtggctctaacgcctgctggggtgcaaagtcttgtagctaaaggtcatgaagtcctcattgaaaccaatgcaggtcttggatctggctttactgatgcagactacgaaaaacaaggtgccaaaattgttgcaactgctgcagaagcatgggcagctgagctcgtagttaaggttaaggagcctcttgctgcagaatatggcttccttcgtgaagaccttttactctttacttacttgcacatggcagcagctccagaattggcagatgctatggtcaatgctaagacaacaggtgtggcctatgaaacagtacgtagccaagaaggtcacctaccacttttggttccaatgagtgaagtagcaggacgtatggctgttcaaatcggtgcacatttcttgaccaaacaagagggtggttcaggtgttctcctaggtggtgtgcctggtgttcctaaaggtaaagtgactattatcgggggtggtgtcgtagggacacatgcagcccgtattgcccttggacttggagctcaagtgactatccttgatatcagtgccaaacgtttgtctgtccttgaagaggtctttggtagccaaattcaaacactgatgtcaaatccgctcaacattgaagcgagtgttcgtgatgctgacgtggttatcggtgcagttcttatcccaggggcaaaagcaccaaaactcgttactgaccatatggttaaacaaatgcgtccaggttcagttattgtggacgttgctgtcgaccaaggtggggttgttgaaactgcggatcgtgtgaccactcacgatgaacctgtttatgaaacacatggtgttcttcactatgccgttgccaatatcccaggagctgtggcacgtacatcaaccattgcccttaccaacgtcactttgccttatatcgaagcccttgcaggaaaaggattcagaaaggcaattaacgacgacgaaggtcttcgtcaaggggttacaacctaccaaggtcatatcactagcaaaccggttgcaaagggcctaaacagagaatatacatcaattgacgaattggcctaaacagagtcatttatcatacacaaagaggagtcgcactatgatagggggtgactcctttttgaggtatgagcaaaaagtgaaccatttttttgcgagttgataggcgactgctcgcaaagcctgatactgtttgatttcttctaattttattcttattttatgatataatgagtaggcatattaagggcagtaatgagcacctataatgctttttattcatgcttatctttaggaggttttatcgtggccaaccatattcgtgtaattacagcaatagttttctctcagcttgtcgttctttattttggttttcgtatggatgtgtctttgaccggactgctaactacagtagctgtggcatccctggttgagatcatttatcatgtgaagcttgttcgtaagataggagccaatatttcttttgaaactttttggaaaaactgtgaccaactttttagaaaaaatgctgtgctgttggctattttactttgtgacctgcttatttttaaaggtggggatttcatggccttcattctttggcaagttacctttgttgtcttggtaagtattatcatcatggcatcaaataatgcaccggacgcatgataatacttaaatcttgcaatgaaagagtttagataatgtttagcattcatagaaatcatttgtcagaccagggcgttgactatgtcacctttggtcgaggagataaggttctcgttatcattacgggattaagtttgcaaggcttaagtgatatgtctgaccttgccatttactcgctattttatcgatttgctaaggagtataaggtctatatttttgatagaaaggaccatatcaaagaaggtatttcaattgagaatatggctgatgacctctaccattctttacaagaattacatattgctaatgcctctatcataggcatgtcacaaggtggtatgattgctcagctgtttgctattaagtatcctcaaaaggtgactagtctggtgttagctctgacattctctcgaaataatgatatcagtagagacaccatcgtaggctggattgagatggctaaaaatggtgagatggctaagctcaataaggattcaatgtgtaaaacattttcgtctcctttgttaaagaaattatatgtgattaataaactatttttgaagactgtgagtgttgaaaaacaagaacgatttgtccgtttagccaagtcaattcttgagtttgattgccataagtcccttgataaaatcacctgcccgactcttgtcttgggggctaaaaaagatttggttctgggagtggatggtgccagggagctggcaaatggcattccaaatgcttcttattatgaatttagcaaactagggcatgcggcttatattgaaagtaagcaatttaataaaatgatattagaatttctgcgaaagaatgcttaggtagtggactgatagaaacctattaaaatagaatgagaaaggggttacagtggagcttgtagcctctttttatttccggttcaattgtgtgcagtctgaaaaattaaatgatagaatgtcggtagataggaggatacagaaatgttaaactatgatttgattgttatcggtttcggtaaagctggtaaaactctggctgctaagatgaatgcagctggtaagaaagttgctgtcatcgagcgcagtaaagccatgtatggtggtacttgcattaatattgcgtgtatcccaaccaagactatgattgttgcggctgagaagggctggtcatttgacgacaccatgaaagaacgtggtgcggtgactggtcgtcttaatgctaagaattataagatgttggcagacaatggcgttgatgtcattgatgcagaggcacattttgtgtcaaataaggttattgaagtagtggctggtgatgatcgccaagagctaacagctgagactattgtcataaatacaggtgctgtgtctaatgtcttgcctattcctggtttgacaacaactgagcatgtctacgattcaactggtattcaaacccttgaagccttgccaaaacgtctgggtgtcctaggtggtggtaatatcggtcttgaatttgctggcctttataaccgtttgggaagccaagtgactgtcttggatgcagcgactagcttcttgccacgtgtagagccatctattgctaagttggccaaggaatacatggaagaggacggcattgtctttgagcaaggtgttaaaacttctgaagttaagaatgatggtgatgaagttgtcgttgttactgacaaaggcgagttccgttttgatgcgctcctctatgcgacaggacgcaagcctaatatcgaaccccttcacttggaaaatacagatattgccttgacagaacgtggcggtattcaggttaataagcatttggaaacaagtgttcctggtgtctttgcggtgggtgacgttaatggtggtctccaattcacttacatttcactagatgatttccgtattgtctttaattacttgacaggggatggtagctataaccttgaaacacgtggagcagttccaactgccatgttcctcaacccacctttggcacaggttggccttactgaagaccaagccagagtagcaggtggaccagttgctgtcaaggaacttccagttgctggcatgcctcgtggtcatgttaacggtgatttgcgcggtgctttcaaagctgtggtaaatcctgaaactaaggaaattttgggagtgaccctctttggtcaagaatctcatgaaattatcaatctaattaccctagcgatgaatcatcacattccatatacagatttggctaaacaaatctttactcacccaactatggctgagaacctaaacgatttgtttgcgatttaaaatgaaaagagccgagaggctctttttttgaaaacatatctctaatacaaagcgacactctaggttagatgtcgctttttttgcgctttgatgataagatagaagtgacataggaaaattccttagattggtgctctctgtctcctttgaatgcttgattgaccttgagtcaccactagaatctgtatgaaaaatctagaaagacactcgcctgcaaattcgtctgtgagtgtgtgtaatttatgactaagaaagtaggagtgggcaaggctcacagtaagattattttgatgggggagcactcggtcgtttatggtcatcctgcccttgccctccctcttaaggatattgaggttgtctgtcagattcaggcggctgagactcctttgacgctcaaggctcaagatcccttgacgacggcgattttttcagcgcttaattatctggaaatcaagaatcagcctatcagctatgctattaagtctagtgtccctgaaaagcgtggcatggggtcgtctgcggctgtagccattgcggcaattcgagcggtctttgattattttgatcaggagcttagccaggagaccttggaaatgctagttcatcaggcggagactattgcccatagtaaacctagtggtttagatgcaaagacctgcttgagtgaccaagccattagctttacgcgtaatatcggtttcaaggaaatcgaggtcaatttaggtgcctatctggtcattgctgatacgggtatccatggaaatacccgtgaggctgtggaaaaggttgaggccattggtttagatgccttgtcagatctcaaccaactgggcgaattaagtcagaaggcagaacgcgccctcaaagccaaggatcaaaagcttcttggtcagctcatgtctcaagcacataatcaccttaaatctttaggggtgtcttgtgatttgtcggatcttctagtagcaactgctctggagcaaggtgcactgggagccaagatgtcaggtggaggattgggtggttgcattattgccctaacaagtactaaagaccaagcccgaacgattgctaaaaaacttcaagaaaaaggagccgtaaacacgtggatagaaagcctgtaagcgtcaaatcgtacgcaaatattgctattgtcaaatactggggtaaagcggatgcggagcgtatgattccttcaaccagcagtatctcactgactctggaaaatatgtatacggaaaccaagttgtcttttctgcctgaggatgcgaccagtgatgtcatgtatatcgatgatgagctccaaggggaaaaagaaacaaccaaggccagtaaggtattagacctcttccgtactaatccaaaccaatatgtcaagattgaaacttggaacaacatgccaacagctgcaggtctatcatcaagttcttcaggactttctgccctagttaaggcagccaacgagctcttccaagtcggaaaaacgcagtctgagttagctcaaattgccaagtttgcttcaggctcatcatcacgctctttctttggtccattggcagcttgggacaaggatagcggtgaggtttaccaagttgaaacagacctcaaattggctatgattatgctggttttgacagatcaaaagaaacccgtatcaagccgtgatggtatgaagttgtgtaccgaaacatcgacatccttcccagagtggattaaacagtctgagcaggattacaaggatatgttagtctacctcaaagctaatgatttccaagcggtcggtgagctcactgaagctaatgcccttcatatgcaccaaacaacaagtacggcaaaccctccattttcatatctgacggatgcttcctatcaggctatggatgaggttaagtccctccgtgcctctggtgaacagtgttacttcactatggatgcggggccaaacgttaaggtgctttgcctggaaaaagacctggaccgcctagcagaccatttccgtaaggattatcagatcatcgtttcacgcaccaaggagttgccagatgcctaagcagtcggttagtcgagccagggtaaaaactggcggaaaactctatattgctggagaatattcagttctaacacctgagcagacagccctaatccagttcatccctatctttatgtcagcagaggtcaaggaagcaccaagcacacagctatcttctgatatgtttgactatagtgttagccgtgagccagacgcaaattatgccctcattcaagaggctttgaatacttttgaagcctattgtggtgagaacttgcccactctggatctttcaattactggaaagttggagcgagatggtgttaaatttggcattggctcatcgggttcagttgtggttttgaccctcaaggccttggcagcagctctgcagaaagacttgtccgaagacattctctttaaattagctagttacaccctcctcaaacaaggagacaacggttctatgggagatttagcttgtatcgtatacgagaatctggtttcctatcgctcttttgaccgtgcaaaaatagcagagcttatagaccaaatgactctatcagaacttttggagaaagactggggctatcgtatcagacctgtagtgccagctctcaaagctcattttttggtggggtggaccaagcaagctgctatctcaaaagacatggttaagatggccaaatctcgtatatcaagcaagtatctaggtgaaaccgaagttgctgttcaagctgccatcaaggctctggaaacaggagataagaacttgcttaagagcagccttcaaactgtcagtgaccagttggaatcactgagtccagatatttatgtggacaagctaaaaaaactcaaagaagcagagcaaggactcgatgccattgctaagtcctctggagctggaggtggcgactgtggtatcgcctttgcctttgaccaatcaagccgagatgctctagttgagcgttggcagcaggtaggaatagagctcttgtatgaggtataggaatcagcttagtagataataatcacgcaagaaagtaaagaaataacctatgacaaatcgtaaagacgatcacatccgttatgcccttaagtaccagtcgccctacaatagttttgacgatatggaacttacccacaagtctctaccaacttatgatttagatcagattgacttgtccacacattttgcaggacgagattggaactttcccttttatatcaatgccatgacaggtggttctgccaaaggtggtgcagttaatcgtaaattggctgaggtggccagtcgaacaggtattctcatggtgacgggttcctacagtgctgctctaaaaggagaagcaccagaatcctttgactatcgtcaagagtttccagacttagacctagcgactaatatcggtgtggataagtctgtggacctggggattaagacggtggaagccatgaatccagtctttttacagctccatgttaaccttatgcaggagcttctcatgcctgagggagaacgtattttccacacttggaaggaaaatgtggcggcttatgcacagaacatagaggttcctcttgtgcttaaggaggtcggctttggtatggatgtggaaaccattcgttatgccatgtctcaaggaatcaagactgtggatatctcaggtcgtggtgggactagcttcgcctatattgaaaatagtcgaggtggcaaccgtgattacctcaatgactggggacaaagcaccgttcagaccctcttgcaagcccaagaccttcgtgataatgtggaaatcctagcctctggtggcgtgcgaaacccactcgatatggtcaaatgtctggtcctaggagcaaaaggcgtaggcctctcacgaacagtacttgaattggtggaacgttaccctgtggataaggttgtggctattgttaatggctggaaggatgaccttcgtcttattatgtgtgcccttgattgtcgaactgtagatgagctcaaatctgttgattacattctacatggtaagctacaaggaacttatatcaagcaaggaaagtaggaaagagctaagtgctctttttttcttttataaagatggtaaaacaatttctctaggcgatgattattatgaagacatcaccttaacttcattcaaagaataataattacgttcttgatttgacttgcttctagcgagcaaagcgagcgcttaatgagactttccgctgtgagaaaagttcttgaaacactagtgtttcaagaactcggaatttttgagaccttaggctcaaaaattagtcatggagcttcgaagaagatcgctgacgtccgcactcacttaaggaaagtctcaaaaaatctatttttcaaaagaatatcttccaaaaaagagcctaagctcttttttattatccaatcaagcaaaaagtcaacttttccccttgacaagttactgccataggagtattattttcagtgaaatacggtaggtgaggctaccacaaggatacggatgactaccgcaaagcagtggagacactactcgttggtcaacagtcctgatcgccaaggtcaagactaagctcatttcatcgccttgcggagctaaagcttgaacggtccattttttgacagaatctattaaaaaatccacctcgagtttctagagtcttacctgtatatgggtaggactcttttcatttgtccgaggtccacccaccatcaaaaaaattgaaaggagaaacctatgagactaatcgacgatcaccccgaaccgcacctaaccagtcaatcgctgattagtgtcttagggactccataagtgattggctcctgtttaaataaggagattccaatgtcaacaaataaagaaagacttattgctgctcttcaagagccacttgaaacaacccttactcgctacaagactcatttggatggcttgaaggaagaccaagtagaagaaaatcgtgacctttatggggaaaatgtcataaccaaaggacaagaagattctatcatcaaaaagatttatgaatctatcatcaatccctttactgttattctcctagtcattgctctggtttcctttatcaccaatgtctggcttgctaaaccaggtgaagaagatccaacgacttctatcattatcgtcactctggttctcatatctggtggcatccgttttattcaagaacttcgtagtgacaaggctgctagcaatttgtctcgcatgattgtcaatacagcaacagtacttcgagatggcagtgagcaagaaatcccaatcgatgaaattgtggttggagatgtggtcaaactgagtgcgggagatatgattcctgccgatgtggtcttgctagactctcgtgatttctttgttcaacagtctggcttgacaggtgaaagcgatgctgtggaaaaagcttgtctggctaaggcggatggtcaaaatctagagagtttgcttgaaagtgagagccttgctttcatgggaactaatgttatctctggtcgtgcaacagccttggttttagttgttggtgatgacaccatgatgggagctatcgagcagaccatcaatacttatgacgaaccaacttcatttgaacgtgagatgaactccatttcttggctcttgattcgacttatgttggtcatggttcctgttgtttttgtgattaacggtttaacagatggggactggcttgaagccggcgtctttgcccttagtgtgggagtcggtttgaccccagaaatgttgccgatgattatcacagccagtcttgccaagggttctatcattatggccaaggaaaaggtggtcatcaaaaaacttaatgctattcaagacctaggggctatcgacatcctttgtacggataagacaggaaccctgactcaggatgaaatcgttcttgagtaccctcttgatatccatggcgaccttgacctttcagtgcttcggagagcctatcttaactcttatttccaaactggcttgaaaaatcttatggaccgtgccattattagccgaactgagagagaagctaagaaacacgacatcgttcgtgaccttgaccaaaccttccacaagattgatgagctcccttttgattttgaacgccgtcgcatgagtgtcattgttaaagacaatgatggttttgtcagcatggtgacaaaaggtgcccttgaagaaatgctctcagtttctaactatgtggaatacaagggtgacattatcccattaacagacgatgttcgtgaggaagttctcgcggaagtcgcacagttgaatgaacaaggtttacgtgttctcggtgttagctataaatcacagcttaatgagaatgacgtctttagtgtcgaagatgaaagtgatatgattttgacgggatatcttgccttccttgacccaccaaaaccatcagcagcacctgctatcaaagctttggcagaatatggtgtgaccacaaagattttgactggagacaatgataaggtgacacaggcagtctgtgaaaaagttggtctagatgtgacacacatcctacttggaagtgatcttgataccatgtcagatcaagatttggctaaggctgtggaaacgacaacagtctttgctaagttatccccagaccaaaaggctcgaattatcctaagtcttaaggaaaatggccacaaggtaggctatatgggtgatggaatcaacgatgccccatctatgaaggtgtcagatgtgggtatctctgtggatacagctgttgatattgctaaagaaactgcagatgttatcttgcttgataaggatctaatggtcttggaaaaaggtctagttgaaggacgtaaagtctatgccaatatgaccaagtatatcaagatgaccgtttcttcaaatttcggtaatattttttctctcctctttgccagcatcttcttaccattcctgccaatggcacctgtgcatttgattgtccttaatcttgtctatgatatttcttgtatcgctcttccatttgacaatgtggacaaggaatttcttaaagagccacatatctgggaagccaaatcaataatgcgtttcatggcttggtttggacctatttcgtctgtatttgatattttgacttacatcttgctctatttcatcattgtgccaatgattttggggcatggctatgttcatggttcaccagaagcagcagcctttattatcatcttccaaacaggttggtttatcgaatctatgtggtctcaaaccatggttatccacatgttacgttcaccaaaactaccatttattcaaagccacccagcactatctgttgttgtgacaaccctatttgctgctgtctttgtaacctctcttccctacagtccattggctagtctcttaaaacttagtcatctaaatggtctctatttcattctcttgtttgttattatcgttttgtatatgcttagtgttacctttgtgaagcatatctatattaagaaatataaagaatggttataggacaactatccttagaaaaaagagcgtaagctcttttttcattacctttcattctgccaaaaccttttcatttatggtataatagggcgattatagataatcagaggccctaaaaaacttcagttatgaggacatattttctaagaaatgagagactatgttttcaaggcccctttctttcgtaggctatcccagtgggaggtggaggccctgagatttggggctcaaggctaagaccgccacgaaggaaaccatcacaaaaaaatcttaagaaggaaaaagaaaatgagtaattacgcaattatccttgctgcgggtaaaggaactcgcatgaaatcagatcttccaaaagtattgcacaaggtttcaggcatcactatgcttgaacatgtcttccgtgcagtttcagccattgatccagctaaaaacgttactgttattggtcacaaggctgaacttgttcgtgaggttttggatggtcaatctgccttcactatgcaaactgagcagttggggactggtcacgcagtaatgatggctgaagatgagttggctggacttgaaggtcaaacgcttgttattgctggtgacacgcctttgattactggtgaaagccttaaaaaccttattgatttccatgttaatcacaaaaatgttgccactatcttgactgcaactgcggacaatccatttggttatggtcgtatcatccgtaacgaaaatggcgaagtgactaagattgttgagcaaaaagatgccaacgaattcgaacaacaagtcaaagaaatcaatacagggacttacgtttttgacaataaacgtctcttcgaagcacttaaaaacatcaatactaacaacgctcaaggggaatactatttgactgatgtcatttctattttccgtgagaatggtgaaaaagtaggtgccttcacccttcgtgacttcggagaaagtcttggggttaatgaccgtgttgccctagccacagcagaggatgttatgcgtcgtcgtatcaacaaagctcacatggtcaacggtgttactttccaaaatccaaacgctacttatatcgacgtggatgtggaaattgagccagatgttgtcattgaagctaatgtgacacttaaaggacaaactaagattggtgcagagtcagtgcttactaatggtacttatattgttgattcaactatcggtgccaaaactgttatcactaactctatgattgagcactcagtggttgaagaaggtgttaccgttggtccatttgcccatgttcgtccagattcaaccctcaaaaaagatgttcatatcggtaacttcgttgaggttaaggggtctactatcggtgaaaataccaaggctggtcacttaacctacattggtaatgcggaagttggttctgacgttaactttggtgccggaacaattaccgtaaactatgatggacaacacaagttaaagacacaaattgctaacaacgtctttatcggaagcaattcaaccttgattgcaccgcttgaaattggggctaacgctctcacagcggctggttcaaccatcacagatgatgtgccagctgacagcgtagccattggacgtggccgtcaggtcaataaagaaggctatgccattaagaaacctcaccacccaagccaacaaaagtaggcttaagactatctgagctagattctcttgtagagtagaggtagcttagaatgaggtcagaagtaaaaggagtcaattcatggagtttgaagaaaaaacactcaaacgtgagtcaaaatttaagggacatatttttgaagttgcagtagacgaggtcctcttgccagacggtaagacggctggtcgtgaactcatcttccacaagggagcagtagccgttttagcggttaccccagaaggaaaaatcattatcgtaaaacaataccgtaaggctattgaggcggtttcttacgagattcctgcaggcaaactggaagtcggtgaagctggcgatgagatggctgcagcagcgcgtgaacttgaagaggagactcaatacaagggtgatctggaattgatttatgaattttacacagccattggcttttgtaatgagagaatcaaactctatgtagcgaccaaccttaaacctgtggaaaatccacgtccacttgatgatgatgagttccttgaactctatgaattgacctatgaagagtgtatggaacttgtagcgtcaggggctatccaggatgccaaaactatcatcgcactccaatactatgcacttcatttcggaggaaaataagctatgggcaaaccacttttgaccgacgatatcattgagcaggccaagcgtggggaaatcgatttagaggaacatccttattatgaggactatgatcaagagttctatgacgaggattatgaggctgattatcagccttctgcctacaagagccgtcgaattgagaatgccaaacgcaatcaatttcaacacaagcttaatcgcatcctcttttgggtagtggtcctcttgattcttctcttcattgctgtcttttatttctaaaaagtctatgagtcagatagccctagctactgattcaggaaagattacaagctgaaaaggaactatatgaaaattggaattatcgctgccatggagcaggagttagtgcttctagtggagcaattggaaaataaggttgaagaaactgttcttggcaatacctactatacaggacgtttgggaaaacacgacgtcgttttggtacaatcaggtgttggtaaggttatgtcagccatgtctgtggctgtcttggcagaccattttggcgttgatgccctcattaacactggttctgcaggagcagtagcacctggacttaaaattggagatgtggttgtagcttcaaaattagcctatcacgatgttgatttgacagcctttggctatgattatgggcaaatgtctatgcagccactttactttgaaagtgactctaccttcgtagagactttcgaaaaggtcttggctcaggcttccattgattctaagattgggcttatcgctacgggtgatagcttcattgcgggtcaagacaagattgatgctattaaggggcattttccagaagtcatggctgtagagatggagggagcagctattgctcaagccgcacacagtgtcaaaaagcctttcatcgttgtacgtgccatgagtgatacagctgctcatgatgctaacattacctttgatgaattcattattcaggcggggaaacaatcagctgctatcttggttgagtttctcaaagaacttgcctaaaatacattaaatgagtgcttatgctcattttcttaattaatttaaagatgactgctattcatttaagaatggcagtttttttctgcttttagataagataagcttctcattttttaaagaaaaaatctgaattttagcatttttcagacggaaattgaattaaaattatggcaataaaatgagaaagaaaaataatattaaaagagagactcctaaagaaagcttatcatataagggtttacaaatttcactatctattgatatcttagaaagctttacaaaacctccaaaggggtaaataattatcttgcaaagttctgaaaatagtgtataattcagaatgaaaagggttacaaaaatgttaagatttgtaaaaatgggaggatagaatcatgaataaccgattcggtgattcgaggcagcgtttctccatccgtaagtttacggtgggcgttgcttcggtcttactttcgtctgcagtttttggtgtaagtaccgccaaagcagatcaagctgaagagcctaaaggccaaccagcgactagtgtacttgaggaagccagtgagtctgatggtgggggccaaaggacaagcactagtgcctcaagtcaagaagtgacagctgaacctaccgttcaagcagaaagtaccagtgctatctcagtaactgctgtttctagtgaagttgcgcttcaagagcaaacggttgcaagctctgagcaaacaagttcatcacaagataagactagtgaggggctcagtgagaaacctgttacagtcaatgaaacacgagaagctagcgctagcgacctcgctgcagcaaacaatacgagttccgcttcgtctgataatttcggacttaaggttaccaacctaagtcgcccgattccatcggatgtcaaggtgacaaagacaggaactgaaatcactgttcaaaatcctgatgtagaaatggaatttccgaacggaaatagtaagtacgctactagcaaggttgtctaccacaatattcctttccctgatgatatgaccatcaatgaaggggatcaggtcatttttaatttgcctgagcagttgcgtttccgtactagctacaatatcaatgtctataatccagacaatcaaattgtaggtctggctcaaattgatcctgagaagaatcgtgtcacaacgacctttaataactatttccaaacacatcccaacaataagctcatgagtttggagttggataccctttattctgaagaagtagatgaaggggaacatcttactcttgattttgagggacgtatcattcatgtttcagtgggtaaagtgcagtcacctcctccaggtcatgaggttatttctaagtggggtagtcaagacaagaatgatcctacgcttttgaattggcagatgcgtcttaactactcacgtcgtgttcttaacaacttgagattgattgacacttggtctgacaatcaacgatttgtggacggttctttgcaactccgctacattgattcggcagatccttggattgacaagggatcagctatggacctgattaagagtttctcttatgacgacacccattttgagcttaaactcaatcagttggaccgcatggtttatgtttggtatcaaacccgtttgacaaaacctgttgaagaatcaaccaaccctgtcaaccgtattaaactccatgcggatgttgtttctgattcttacaagtcaaccattcgcttagttggaggtcgtggagatgccatcggggataatctcgctcatttcaatcttgaacttgagaaggacttggcaggcagagacctcaaggacaaagaatttaccttcaaactggttgatgtgacggatagtgccaatcctgttgacttaggggaaaccactaatgatgccaagggtaaaattgtcttttcaaatctctcactcagtaagccaggcgtctatcattatcgtgtgactgaagttccaggtaatgacgaagatgtggtctatgacaaactagaagccaatatcaccattcaggttgttcgtgaaactgtggacaatcaagtcaaattggttgccaaggttgcctatccagaagacattatctttaacaataaattggtaacaccagccaaggccaaaattgcatttggtaaggaattgaccaaggcaggcgttaaacaagatctaaaagcagatcaattccaatttgttcttaaagaccgttttggaaaagtccttgaaactgttggtaatacagctgatggtcaggttgcttttagtgagttaacctttaacaaggtaggtacttacaactacactgttgaagagcttacaggtaaggatgactcaattgtttatgacagcatgaaagctgctgtttctatcacggtaacacgtgatggcgacgcccttgtttcaaccgtggttaatcctaaagacactatctttaacaacaagtttgtgactccagctaaggccgctattcagttcagtaaggaattgactaaggcaggtgtcaaccaaactttgactgctaatgagttccaatttgttctcaaagatagtgccggtcatattgtcgaaacagttggtaatacagctgatggtcgtgttgcctttagtgaacttcactttgataaggcaggaacttacacttatactgttgaagaagttaagggaactaacgaagatatcatctatgatggtatgaaagcaactgtctggattacagtgacacgagatggtgatgctttggtatcaacagttgctaatccaaaagatactgttttcaataactatgtgaaagacgtgcaaccagctaaggccaaattcgaattgaccaaggttcttacaggtcgtaacctcaaagatggtgagtttagtttcgttctcaaggacgacaagggtaatgttatccaaacagtgaccaataatgcacaaggaaacattagttttgaaaatattgtctacgacaaaccaggtgtttactactacactgttgaagaagtcaagggcaatgaagctgacgtggtttatgataacatggtggctaaattccaggtgaccgttactaagactgtaggtgaaaaggaaaatctgctcgtagcagccgttctccttcctttggatacagaatttaacaatagttacattcctccaaaacctcctacaccgccaacaccaccgacaccaccaagtgtcccacctaaaccaccagtggttccgccaacaccaccaactccgcctactccaccggtgactccaaaaccagctaagccagttcaatcctctgagaaatcaggacctcaacttccagagactggtcaagctaatgatactgctttgcttgcccttggtgtggcagcagaagtggcagcagtcatgggtgtagcatatagccatcgtcgccgtaaagacgtttaagatgatgacctaaaagatcgagtattctcgatcttttttagtatttggccgcctatctcattaaatgagaaatcaagataaagccaactgcaagatgaaatttctactaaattaagctataatgaagagtatgaaagttctactttatcttgaaggaaaatcggttcttgaaaaatcaggaatcggacgggctctccaccatcagatgcatgccttggacttggcggggattccctatacaacggacatcttgggtgattatgatgtcgttcatattaatacttatgggccacgcagcttgatgttgttgcatgctgcaaaacgccgtggcaagaaggtcatcatgcatggtcattcgacacgtgaggactttgagaattcattcatcggttctaaccttttggccccactttttggaaaatatttggcccacatgtaccaaaaggctgattacgtgattacgccatctgagtattctaaaaaattgattcagtcttacggagttaccacaccaatcattgctgtttcaaatgggattgatttgaaaaaatacggcaaggatccacgtaaggaagaagttttccgagactactttggtatcaaggaaggacagccagtggtgatttgtgcgggtctttatttccaacgcaagggaattgaagatttcgtcaaggttgccgaaaagatgcctcatgttcgttttatttggttaggtagtatcagcaaatggttgattcctaagaagattcgagacattgtcaatggtaagcatcctgataatgtcagcttcccaggttatttcaagggagccgtcttccagggagccatgagtggtgctaatgctttctttttcccatcttacgaggaaactgaagggattgtggtgctagaagcctttgccagtcaccagcatgtagttttgcgtgatattcctgtttatgaaggctgggttgatgacaaatcggcctcatttgggcacaacgtggacgaatttgtagtagccttgcaagatattatcgatggtaaagtggacaaacgtgaagaaggctataaggttgcagaaagtcgctcgattgatgatgtcgcccaaaagcttgttgaagcctacaaagaagtattggagatttaaatgcgtatcggattgtttacagatacctattttccacaggtatcaggtgttgcgaccagtattcgcacgctgaagacgcagttggaaaaaatgggacatacagtctttatctttaccacgactgatagagatgttgaccgctatgaagactggcagattgtccgtattccgagtgtgcctttctttgcttttaaggatcgccgtgtagcttatcgtggcttttccaaggcactagagattgccaaacaatataagcttgatattattcatacgcagacagagttttcactaggtctgctagggattgccattgcacgcgaacttaggattcctgttgtgcatacctaccatactcagtatgaagactatgtccgctatattgccaaaggtatggttatccgtccaagtatggttaagtacattgttcgtggctttatgagtgatttggatggagttatctgtccgagtgagattgtttatgaccttttgctcaagtacaaggttgcagctgaaaaacgtgtcattccaactgggattgaacttgaaaagttccaacgtccagagattactgaagatgatgtgacggacttgagaactaagcttggtatcgcctctgatgagactatgttgttgagcctttctcgtgtgtcctatgagaaaaacatccatgctgtactggctgctctcccttctgttttggaggaagacgacaaggtgcgtttggtggtggctggtgacggtccttacctaccagatcttaagtctcaagccaaaaaacttggtattcaggacaaggtggttttcactggtatgattgcgcctagtgagacagcactttattataagtctgctgatttcttcatttcggcatcaaccagtgagactcaaggcttgacctatctggaagccttggctagtggtaccccaatcattgctcacggaaatccttatttggataatgtgattacagaccagatgtttggaacgctttattatcatgataatgatttagctggggccattttggaagcagccattgcaacaccagaaaaagacgaaactaagtgggctgacaagctttatgaaatttctgcggaaaacttcggaaaacgtgtctatgagtattacttggaccttacgatttctaaggatttccacaatgatttgaatggtgaagatagtaccatgaaacgcttgacgcgtatggtaacttatttgccgactaaggctattaccttgcctgttaatggctctgttcgtatccttaaaggatcagccaaacaggtcaagaaaatcagaaatatcacgaaacttttggattaggaaagctaccagattttcctagtcagataaaatcttagaattgattaataaaagagataattagcttgaaaaattacagtttcatgctataataacgcatagagacatatcagtcatgggaaatctttcagagagcgtgtggagctgggaatcacgcagaggacatgattgggactactcgattaactttttatgcaaacataaaacggtggccacgttagagccaatcagaggtgtaggacagactcgttttttgtcgtacatgaactaaggtggaaccacgttgcgacgtccttttgaggatgtcgctttttatatttggcttaagcatatttaaagggctaaaccaaaattgaggggaggaggctaattgagtcgaaatacaatcctattttctaagacaggtgccatattattttatttggtaacatatatgttgttatttatctctctaatgttttgggatggaccggttaccattcttattagcctttattccttagggataccgcttctagtttttggcattcccttttatagcatcctaatgcttactaagacaaaactaaaagttcagataggatacttgtgtagttcgactgcagcggtttatctttatagtgcattgacaacctatccaatacgtctatatccgattgtagatggaactacactccccttatggaaacatgtttttatagtcctatctcttatagggtttttaactttctcaactcttctatttcgtataagaatgaaagagtttagaacatcaattattgatattaatttagattaattttaaggagaatatgatgattaacattactttcccagatggcgctgttcgtgaattcgaatctggcgttacaacttttgaaattgcacaatctatcagcaactctttggctaagaaagctcttgctggtaaatttaacggcaaattgattgacacaactcgtgcgatcactgaagatggaagcatcgaaatcgtgacacctgatcacgaagatgcccttccaatcttgcgtcactcagcggctcacttgtttgcccaagcagctcgtcgccttttcccagatattcatttgggtgttggtccagctatcgaagatggtttctactacgatactgacaatgaagctggtcaaatctctaacgaagaccttcctcgtatcgaagaagaaatgaagaaaatcgttaaagaaaacttcccatcaatccgtgaagaagtgactaaagacgaagcgcgtgaaatcttcaaaaatgacccatataaattggaattgattgaagaacactcagaagacgaaggtggtttgactatctaccgtcaaggtgagtacgttgacctttgccgtggcccacacgtgccatcaactggtcgtatccaagtctttcaccttttgaatgttgcaggtgcttactggcgtggaaatagcgataatgctatgatgcaacgtatctacggtacagcttggttcgataaaaaagatctcaaggcttaccttaaacgtcttgaagaagctaaagaacgtgaccaccgtaaacttggtaaagaacttgatttgttcatgatttctcaagaggtcggtcaaggtcttccattctggttgccaaatggtgcgacaatccgtcgtgtcttggaacgttacattgttgataaggaagtagcagcaggataccaacacgtttacactccaccaattgcctcagttgagctatacaaaacttcaggtcactgggatcactaccgtgaagatatgttcccaacaatggatatgggagatggtgaagcctttgtccttcgtccaatgaactgtcctcaccacatcgaagtttacaaacaccatgtgcactcttaccgcgaattgcctatccgtatcgctgaaattggtatgatgcaccgttatgaaaaatcaggtgcccttacaggacttcaacgtgtgcgtgaaatgtcacttaatgacggtcatactttcgtaacacctgaacaaatcaaagatgagttccaacgtacgcttcaattgattatcgacgtttacgaagatttcaacttgactgactatcgtttccgtttgtcataccgcgaccctaaagatactcacaaatactttgacaatgacgaaatgtgggaaaatgctcaaagcatgttgaaatcagccatggatgacatggaactcgactactttgaagcagaaggtgaagctgccttctacggtccaaaacttgatatccaagtgaagactgcccttggtaatgaagaaacactttctactatccaattggacttcttgcttccagaacgttttgaccttaaatatatcggagctgatggagaagaacaccgtccagttatgattcaccgtggggttatttcaacaatggaacgctttacagctatccttattgaaaactataaaggagccttcccaacttggttggcacctcaacaagtaactgttatcccagtttcaaatgaagcccacacagattacgcttgggaagttgctaaacaacttcgtgaccgtggtatccgtgttgaagtggatgaacgtaacgagaaaatgcaatacaagattcgtgcgtctcaaacacaaaaaatcccttaccaattgattgttggtgacaaggaaatggaagacggaactgttaacgttcgtcgctatggacaaaaacaaacacacactgaaactgtatcagaatttgtagaaaatatccttgctgatatcgcccgcaaatcacgctcagatgccgaataaatcagaaagtcggttagctaagctagctgactttttagtaggataaaccatgcacgtttttatgaaaagactcttattcctggtgggagcagttctggttttgttactggcgagttttacttatcatagattggccttgcaaagggaaaaggcttctcttaaacctatgggacaaatggtgtctgttaatggccatgaaatgagcgtctttgtaaagggggaggggtcacaaactctagtttttctatctggtgctggaacggcctctcccattctagattttaaagacttgtatgatgggctttcgaagcaatacaggatagtcgttgtagagagggctggttatggttacagtgaggacacttcagagtccagagatgtttctgaggttctgtcagaaacacgacaagccctagccaaggctcatttatctggtccttatattatcctctctcattccatggcctctttagagacactcctgtggcaggaaaaatatccaggtgaagtgaaggctatcattggtttagattgggctctaccagaaagttactcccatttgaaaatgcatccccagcttttacgtttggctcgttgggggagtcaattaggcttattaaggtatttaccgagtcgcttatatgtgcctaatgccaatctcagtagtagtgaccgccgcctctatcaacggatagcctatcgtcaaattttgtcaaaggctatgttaaatgagagcctgtctgttaaggaaaatgcgaaaaaggttacttctagcattgattcacaaattccaaccttactgatggtctcgaatggtgggggtactggttttagccagaaggactggcggcattatgcgactagctttgcaaaggaccagaaaaatatcgaagtgactttttatgatgctccgcattatctttatcactatcagaccaaagaggtggccgagaagatagaggagttcatcaaagagacgactgattaaatttacgtatgttattgaggagggatgtgatgctcattggttcaaaagcctttcgaaacttgtgggaggactggcgaagggactaccagccattgcaagtactaaagctattgttagcttatatagggatgccagaggatttatcgggagagcttgaagaaacccaacaccttttatcttattttgatcctgacttggcaccgcatgattctttctggaaggatgtcgttaaattggtagacctggcttttcctggtgatagtttgtctaagaatgcctctattgagagacaaatccatcagctacgttacctgatttctagtcaacaggcccagtatgtgcgaacgcattataaaaagccagggatgacagataaagaagctttggctgtctatctgagatggaagcctttcaccatgtttgatcagggacgtttgcaccaaaagatttctatctgtgatggcaaggcggtttatcctgatgggattccaagtgttaatctaaaaattcttctctataatcggattgagtttattctggatagtcagggaaactttctcaatgaggtcgatgcggagcaggtgaccgagagtggggtggttaatggtgctagttttaactatggtaatttcaaacgccactggcaactggatgtggagccggtccaaccacatgaccctgattttcgtaatcgaatgactaggggctttcgttcacccaacaaattgaaaaaacgttggggacagcaagcgcctgaacagtttgataaatctttctacaatccaaaaggcatctatgcccagtcccataggtctttggcaaatgatgtcaaacgccaagccagactttttctcgctctggtttatggctttaaaccggatcagaccaagcaatcaaaggaggttcatatgtctaaacaaccacaaaacaataaaggaacagcagttctaggctcactagtctttatggccttatacgccctaggtatttggcacaatgctgtccgaggaaatattccctttctcattctttggagtgttttactccttgttaatgtcagctattttattttccgcttgagaaaataaaaaagaaagtgatacagacctaaatggtaagaaatttaggtccgtatcacttttttgtatattcaatgatggcttaccatttgctttcttctgggataataatccagcaaatgatgtagaaaagaaagcctgttccaaataagaaaatcgttgcagcccaaatgaggcgaataatgacagggtcgatatcaagatatttagcgataccagaacaaacaccggcaatgattttgttgtttggatctcgtctgagttcttttttcatatgatttacctccgtatgccttattataccataacacctagaagtctagtattagcttaaggaagcatgaagtagacgatacccagatattgaagcgctgaagccagcatgatgaagaggtgccaaatcatgtggaagtatggttttttcttagcatagaaagctgcaccaaccgtgtatgacaatcctccagcaagcatgagtccccaaaaggctggccctgtcttagtgacgatagctggaataatgaagataaccaaccatcccatcatcagatagaggaagagggagaacttttcattgatttttttagcaaagattttatagagaataccaaaaatggttgttccccattggaggatgatgatgctatagcctagccaaccgccaaccaatgagagggcaacaggggtgtagcttccagcaatggcgatataaatcatgctgtggtcaataattcttagaaccatcttgtggggtgagttgtaatccatagcatggtagatggctgagctcaaaaacatgaggaaaagactgataacgaaaacagacatcccgaccgcagcagtcatgccgtagccgttgttggcatgaacagcagtaattggcagtaagaccaacatggccacagctccgacggcgtgagtcacactgtttgccacttcctcaccaaagctaagttttttactgagtttgaggttgggagaagcattaaaagtagcagtattagacattatttcctccttcaaggtcgttcaaaagttgatgggtagctcggtaacattgaagcgtctgacaggctgagagtatgacttgtggagcttcttgaggaaactgaccattcatacaggctacaaagtcattgtagtagctcttttgactttcagcatctgttcgtaggatttccaaggttttagcaatctcagaaatctcaaagacggtctttagactagtgatgacaataagtctagctacctgagcagcattatattttttcttgatgggttttgcgacatggccgtgtttgacataattattgaccatagaggcggttagccccttatcgtttggtcccagagtgctttgggtgacctggttgacatagagcaaaacctgatccaaatagagttcaatctctggtaattcttcccagagagggtattgttgtgttgtcaaattataaaaacctctttatctagttttcataactagattataacattatagaaattcaagtcaagtcagaacttgtaagatatgaaaaagatgttgagataaaatttccaacatctttattttttatgtgataaggcaggttgattttttatgcttttggatcacttcttatggggttctgagtttctccaaaattgcttgtgcagtttcttggttcatatgtttggccttgagaagttcagccaaaacctgaggcatttcttcaggaatagccccagctaacaaagctagggatttggcttggagtttcatatgtcctgcctgtattcctgttgaagtcagagctttgagagcagccagattttgtgacaaaccaagagagacgatgatactggctagagttttggcatctggatgattaagcaagtcatgggcgatagaagcactagggttaagtccgatagaacctccacgagttgcgattggcatggggagggttaattctcccactagttccttagcttcatgatcataagtccatgtggagagaccacggtagctaccatccttgctagcataggcatggctaccggcctcaacggctcgccaatcgtttccggtcgcgataactagggcatcgataccattgaaaattcccttgttatgggtagctgctcggtaggggtccacctgagccagttggctagccatctccattttcttggctaggtcatgtgcctcttccttattacgactgaggaagcgtgtgctaagacgacaagtcgctgtcacaagactctcagtggctagatttgagagaatagccatgaggctttgaccttttgacaggttttccaactctggtaccagagcttccatcatggtgttgaccatattggctcccatggcttcttgggtatcaacggctagatagacaatgaggaagtctcctttcgtctcagtccagagcttgcgagggccacccccacgcttaacaatagaagggtgagcctctttggcaatttctataaggtcctgactggctgcttgaattttacttgaagcagaaaccttatcagggacatcaaagagggcaacttggccaatcatttgacggtcatggattgtagtcgtgaaaccgccagaacgcttaatgagcttgctagcataggaagcagcagccacaactgagggttcctcggtaaccatgggaacttgataggtcacaccatctaccaatacatctgggcagatggcaaagggaagtgtaaatcgaccaatgacattttcagccatttgattggctgtttcaagggtgagttgttggtccttatccagaagatcttgattttcctgagacaaaagagcattcgttttcaaatgctctttacgttcttgcggtgtcttcttggaaaaaccagtccgagagagttttgtcatattaatttcctttatagatacgttggtgttcagagatttcagctaaacggaaagctccggtttggtaatcagcgaattgagtagaaccagtgtcatccaactgagcctcttcatagaaaagtttttcataatcagtaacgcttaagtgttgacgtttggcaaaggtatctaggcggtccgaacgaagcaggtctttgtatccttcaaccagacgtcctgagaaaatctcagagacagctccagaaccgtaagagaagaaaccaatcttatctccagctttaaggtcttgcgactgttcaagcaaagacacaagtccaagatagagtgaccctgtatagatgtttccaatttgacgactataggtaattgaagcatcgaagttgtttgtcagacgctctttattctctggattcaaatcttttggaataatcttgttaagtcccttaagagctagcttaggataagggagatggagacaaaaagcggcaaaatcagcaaagtcagcctgatggcgttcttgataagctgcccaagttgtcttcaaactgtcaaggtactgcttggttgaataaatgccttgaacaaaaggcgttgaactgtagtttggacgccagaagtccatgacatcacgagtttgagccacattatcatcagcaagctccaaaatacgtggattctgactgactagcatagctacagcaccagctccctgagttgactccccagaagatccgacaccatagcgggcaatatcactagcgataaccagaactttgctatctgggtgagttgccacatgcaacttagcatagttaagtccggctgttgcagcgtaacaagcttccttcatttcaaaagaacgggcaaaaggctgaatacctaaaagactgtgaacatagacagcagcagccttggactggtcaatggaagactcagtagccacgatgaccatatcgatagcttttttgtcgtcgtcatttaaaatatcagccgccgcatcagaggcaagcgtcacgatatcttctgtaatcggcgtaatactggttgcatcaagcatcagccccttgctgaatttttcaggctccgccccacgggcaagagcgagatcagccatgtttagaacatattgactggtcgcaaaaccaatcttatcaattccaatagacatatgatgtttccttttttcttcattgtagagtatccagaagatactaatctatagtgattttaccataaaagagcgctttcgccttgaaaaaactttgatagttagttatatctcattttttgataggaactaggggattttacacgacttacatttgctattccatagcttatatttctcatttacaccagaataaggtaaaattgaaatggtaatctacttgttttttagctatgttagaaaagtaaaattgttgttatatattgaaatcattgcgagcgttaagtgagactttccgctgtgagataagtgtctgtaaataaagtgttttgtttacagacactcggaatttttgagaccataggctcaaaaattagtcttggaacttcgaagaagttcgcagacgtccgtaatcacttaagggaagtctcaaaaaatactttgttttcaatggaataaagaggaaaatcatgacaaaagcagacaatatttttaaagaaaatatcactaaaatcatggaagaaggcgtttggtcggagcaagcacgtcctaaatacaaggatggcaccacagccaactccaaatacatcactggagcttttgcagaatatgacttgagcaagggagagtttccaattaccactcttcgtcctatcgctatcaaatctgccatcaaagaagtgttttggatttatcaagaccagacaaacagcctagatgtccttgaagacaaatacaatgtccactattggaatgactgggaagttgaaggcgtgcctgccaataatggggacaagcgttcgattggtcagcgttatggagcggttgttaagaagcacgatatcattaaccgtttgctggcacagttggaggctaatccgtggaaccgtcgcaatgtcatttccctttgggattacgaggccttcgaggcgacagcaggacttcagccttgtgccttccaaactatgtttgacgttcgccgtgtgggagaggacatttatttggacgccactttgacgcaacgttctaacgatatgctggtggctcatcatattaatgccatgcagtatgtggctcttcagatgatgattgccaagcactttggttggaaagttggtaaattcttttatttcatcaacaacctccatatctatgacaatcaatttgagcaagccgaggaacttctcaaacgtcagccatctgattgccaaccacgtttggtcctcaacgttcctgatggaactaatttcttcaatatcaaaccagaagatttcgaattggttgactatgatcctgttaaacctcaactcaaatttgacttagcaatttaataaatgcttatggtttaagcccttaaagagctggcaaagtttttccaagctctttttctctttttttgttagaatggattgtaaacttaaaaagaaaaggaaatactgtgtctaaacaactcattgctatttgggcggaagctcataaccatgttattgggaagaatcacaccatgccttggcatttgcctgctgaactggcacatttcaagaaaacgaccatgggctcagcaattctcatggggcgtgtgacctttgatggcatgaaccgtcgttgtctaccaggacgtgaaaccttgattttgacacgagacaaggacttcgactgtgagggtgtaacgaccgttacgagtgttgaggaagccctagcttggtttgaacagcaagataaggatctctatattgctggtggtgctggtgtctacaaggcttttgatgggcattatgatgcattcatcaagacaactattgaggctgatttagagggagatacgtattttccacaactagatatgacggcatttaaagtggtatcacacgaacgtgtggccaaggatgataaaaatgcctacgactttagcataagtcgctatgaaaaagaaggagactaggttcatgcaacgtagtgtttttgggttatttactgcattattgggagtactttgtgtgctctctgccattcctgcctttcgcaagaaacgttatgggttagcagtttttctctttttaaatgcttttaccaaccttgtcaatactattcacgccttctatggcaccctattttagaaaagagtgaggaataaatggctggaaatcgtaatgaagaaatggtttattgttcattttgtggcaaaaaccaagaagaagtaaagaaaattatcgctgggaatggcgtctttatctgtaacgaatgtgtggccttgtcacaagaaatcattcgtgaggaaatggcagaagaagttttggctgacttggctgaaactccaaagccaaaagaacttttggatattttgaacaactatgtcgtgggacaagaccgtgcgaaacgtgccttggcggtagctgtttacaaccactataaacgtatcaacttcacagaaagtcgtgaagacaatgatgtggatttgcaaaaatcaaatattctcatgattggaccaactggttcagggaagactttcttggctcagaccttggctcgaagcttgaatgttcctttcgcgattgcggatgcgacatcattgacagaggctggttatgtgggtgaggacgtggaaaatatcctcctcaaactgatccaagcggcagacttcaatattgaacgtgcggaacgtgggatcatctatgtcgacgagattgataagattgctaaaaaaggtgaaaacgtatcaatcactcgtgacgtttctggtgaaggggttcaacaagccctcttgaagattatcgaaggaacagtagctagcgttccacctcaaggtggccgtaaacaccctaaccaagagatgattcaaattgatacgaagaatattctctttatcgtgggtggtgcttttgatggtatcgaagatatcgttaagcaacgtcttggtgagaaaatcattggttttggtcaaaataataaggctattgatgatgactcatcatacatgcaagaaattgtggctgaagatatccaaaaattcggtcttatccctgagtttatcggacgtttgccagtccttgctgcccttgaacagttaacggtggacgacttggttcgtatcttgacagagcctagaaatgccttggttaaacagtatcaaaccctcttgtcttatgatggagttgaacttgagtttgaccaagatgctcttgaagctattgcaactaaggcaatcgaacgtaagactggtgcacgtgggcttcgctctatcattgaagaagtcatgatggacgtcatgtttgaaattcctagccaggaagatgtgactaaggttcgtattaccaaagaagccgttgacggtacagctgctccagttttggaaacagcgtaaggaggacctatggctgaagaacaagtcctaaatacgcacaatgctgagattttgctcagtgcagcaaataagagtcactatccccaagatgacctccctgaggttgccctagcaggacgctcgaatgttggtaaatcaagctttatcaatacacttcttggtcgtaaaaacctcgcacgtacttctgggaaaccaggaaaaacccagttgctcaatttctacaatattgacgacaagctacgctttgtggatgtgccaggttacggttatgcccgtgtgtccaaaaaagaacgtgccaaatggggtaaaatgattgaggaatacctcgtgactcgagacaatcttcgtgtggttgttagcttggttgaccttcgacatgaaccaacccaagacgatatccaaatgtatgaatttcttaagtattatgaaattccagttatcgttgtagcaactaaggctgacaagattcctcgcggaaaatggaacaagcacgaatctatcattaagaaaaaactaaattttgataaaaatgaccatttcatcatcttttcatctgtcacacgtgacggttatgatgaagcatgggatactattttggcagaattgtaagaaaagctcggagaaatctgagtttttttcttgtgatagtctctaactatctctttgatagtttccacttattatccaaggggataatattgtgttaagcttgttttatcacatatattggaggaaactatggaaaaccataattatgaaaatgagggtcagttccaacggaagatgacttctcgccacctctttatgctctcgttggggggtgtcattggtactggtctcttcttgagttcaggctatacaattgcacaagcaggccctcttggtgcgatactatcttatcttgtgggggctatcgttgtttacttggtcatgctttcattgggtgagttagcagttgccatgccagtaacggggtcctttcacacctatgctactaaatttatcagtccgggaaccggctttacggtagcttggctttattggatttgttggacggttgccttgggaacagaatttctgggggcagccatgctgatgcaacgttggtttccatcggtaccagcctggatgttcgcagccttctttgcactggtgatttttgggattaatgctctaagtgtgaggtcatttgcggaagcagaatctttcttctcgtcaataaaagtcattgctatcctggtctttatcatcctgggtctgggggctatgtttggtttggtcagttttgacggtcaccgtgaggctattatgttcaagcacttgacggccaacggtctctttccaaatggtggacttgccattgtgtcagtcatgttggcagttaactatgccttttcaggtacagagttaatcggtattgctgctggtgagacagacaatcctaaagaggctgttccacgagctattaaaacaacgattggacgcttggttatcttatttgtcttgaccattgtggtcttggcttcgcttcttcccatgaaagaagcaggggtatcttcagcacctttcgttgatgtctttgataagatgggaattccatttgcagcggacatcatgaactttgtcatcctgacagctatcctttctgctgggaattctggactctacgcgtcaagccgtatgctttggtctttggccaatgaggggatgctcaataaaaagctagtgaaaatcaataaacatggtgttccaatgacagctcttttgatttctatggcaggagcagttttatcgctcttttcaagtatctatgcagcagatacagtttacctagctttggtatcaatcgctggttttgcagttgttgttgtctggctctctattcctatggcacaaatcaacttccgtaaacagtggaatttagaacattctgatgatgagttggattacaagacgccttttaatccaatcctaccttatatcacaatcattctgttggccatttctgttcttggtattgcttgggatagttcacaacgggcaggactttattttggtattccttttatgattttctgctacctctatcactaccttcgttttaagaaatggtaaggaggccttgcatggcaatatttaaagactatttagagaataaatctcccctcattcttcatggggctctgggaacagagatggagagcttgggttatgatatttctgggaaactctggtcagccaagtacctgcttgacaagccagaagttattcaaaaaatccatgaaacctatgtagctgctgggtctgatttgattaccacatcgtcttatcaggcaaccttaccaggcttgatagacgctggacttactgagaaagaagcggagcagattattgccttgacagtccagttggcaaaggctgcacgtgataaggtatgggcagctctagatgagtctgagaaagcaaaacgtccctatccattgatttctggtgatgtcggtccttacgcagcctatttggccaatggttctgagtacactggtgattatggtcggataactatcaaggaacttaaggagtttcatcgccctcgcattcaaattctcctagatcagggtgtcgatttattggctttggaaaccattcctaatcatctggaagcacaagctttgattgaacttctggctgaagaatttccagaagcagaagcttatatcagttttacagtccaagaaccaggaactatcagtgatgggacttctttagatgagattactcagcttgtttcccagtcagaccaaatcttggctctaggaatcaactgtagttcgcctctgctatataatcaggctcttactattcttaaaaatgctggaaaagctctcattacttaccccaactcaggtgaggtttatgatggtagtacgcagacttggaaacctaaggacaaggatgctctgaccttagtggaacacagcaaggattggcatgatcagtttggagttaagattttaggtggttgctgccgcacacgtccaaatgacattaaagccttatatgcagagtttagaacctagtcaaatttctaattatttgttataataggagactgtaaggctatgagctctacacactattagtagaaaatgaagccagcgttaagctggtttttaaaatgaagaggaaaatatgacctacgaacaagaatttctaaaagacttcgaagcctgggttgttacccaagttaaagtaaacgaaacggccttggccgctagcaagaaaatctgggaagaagatggcgatgagcgtgcacgtgatgcaagttaccgttatgaagccaaattggatgcttacaatttcctaattggtaagtttgccaactatcgtgctggcaaaggtttccatgatatgccagatggcttgttcggggaacgtcactattaatagaggatgaaaaagaaaatggcgacagtactttatggaaaggtgtcgccgattaaaataggagaatactaaacatggctaaagtaaaaaataaaaagaaagcttttaaacaccgtttgaaaaaacaaggacttttcaataatgttaaagcccctgtcccaccagttgcgcctgttccaccagtgccaccagtagcaccacaacctgttgctgaaactaagacagttgctaaggaagaagtagcagctaaagaccttagtcttgaagcttttgcagaacttccagaagttgaaggccttcgttcaaaccttgtagagactctttacaatgaaggtttgacttcagcagaggcttttgctactgtgactgaagaagaagttcttgccctcaaaggtgtaggacctgcgacagttaaaaaattgaaagaaaatggtgtcagctttaaagcttaagcctaaaaaagatccgaggtgtagacttcggatctttattctttgacttggaaagcattgtttgattaggagaacaagaaaaccactagctttttgctagtggttgatagatctgtattatttatttggattttgtttggttaaattaagtccaaaaggtaccaagttttcttgatgcctacggattcgccccatattttcagtgtggcggaagataataatcaaagccatgatggtaaggaccccagtgaaaataaggtcatagccatctagcaagaagtggatggctggaaacacagccaaggtaatcagtccaacaattgcagcagtgatactagaaaatgagatcatgctggttagatagagtgttagggcaaagaccaagagtaggaagacacagtagagtggggcgaaaccaagaagcaccccagcacttgtcgcaacggccttcccacctttaaatccagcaaagattggaaaaacatgtccgataatggcaaagaaaccaatgactagaggtgaaacctctgtaacaccaagccagataggaagaagaacagccaaggtacccttgaacatatccaccaagaaggtgatggtaccagcagtcttacctagaacacgaaaggtattggttgttccagtatttccagagccatgctcacgaagattggtatggaagaaaagtttcccaatccagaggccggtctgaatggaacctagcaagtaggcgattaggattaacaataagattttcatgagataattatagcatacagcctagtaattgacaaagtcagtcagccttaagatatcttttgaactttcttgatttcttttgcaaattcttctgaaaacttataaaataataaggatgaaaattttggaggtcactcttggctaaaaaagaaattaatgtaaataattataatgatgatgccattcaggtactagaagggttggatgcggttcgcaagcgccctggaatgtacattggctcaacagatggaacaggacttcaccacctcgtttgggagattgtcgacaatgcggtcgatgaagctctttctggttttggtgatgttatcgctgttaccctaaataaggatggttccgtttctgtttctgactctggacgtgggatgccgacaggtatgcatgccatgggtaaaccaacagttgaagttattttcactgttctccacgctggtggtaaatttggacagggtggttataagacttctggaggtcttcacggtgtgggttcctcagttgttaatgcgctgtctagttggcttgaggtagaaattacccgtgacggtagtgtttatcgccaacgttttgaaaatggtggtcaccctgtaacagggcttgaaaagattggtaaagcgcctaagtctaagacaggtacaaaagttacctttatgcctgatgcgagcatcttttcaacaactgactttaaatttaacaccatcttagagcgtctcaaagaatcagccttccttcttaagaatgtcactatgacattgacagacttgcgtggcgaagaagaagttcgtgaagaattccactatgaaaatggagttcaagactttgtgtcatatttgaatgaggacaaggaaacgttgacaccagtcatctatattgatggagatcaacaagaatttcacttggaattagcccttcagtataatgacggttactctgacaatatcctttcctttgtcaataatgtccgtactaaggacggaggaactcacgaaacaggatttaagtctgccattaccaaggctcttaatgattatgcacgtaagacgggtcttctcaaagaaaaggataagaacctcgaagggtcagattaccgtgaaggtttatcagcagttatttcgcttttggttcctgaagaacaccttcagtttgaaggacaaaccaaggacaaacttggctctcctttagctcgtccgattgttgatagtattgtttcagagcatctgacttacttccttatggaaaatggggacttagcttctaacttggtgcgtaaggctatcaaggcccgtgatgcccgtgaggctgctagaaaagcgcgtgatgctagtcgaaatggtaagaaaaataaaaaagacaaggggctcttatcagggaaactgacgccagctcagtctaaaaatgctaagaaaaatgaactttatctggtcgaaggggattctgccggtggatcagccaaacaaggtcgtgatcgtaaattccaggctatcctgcctcttcgaggtaaggtcctaaacactgagaaagctaaaatggctgacattctcaaaaatgaagaaatcaataccatgatttacactattggtgcaggtgttggagctgattttaaccttgacgatatcaactacgacaagattatcatcatgaccgatgccgataccgatggggctcacattcagaccttattgctcactttcttctatcgttatatgcgtccactggttgaagcgggacacgtttatattgctctgcctcctctttacaagatgtctaaaggaaaaggcaagaaggaagttgttgaatatgcttggacggatggggaacttgaggaacttcgtcaaaaatttggtcgtggagctattcttcaacgttacaaggggcttggtgagatgaatgctgaccagctttgggaaacaaccatggatccagagacaagaacccttatccgagtgactattgacgacctagcgcgtgccgaacgtcgtgtctccgttcttatgggagataaggcagcaccacgccgtcaatggatcgaagataacgttaaatttaccttggaagaaagtggcgcattttaggttgcaggccagaagggaatgtaataagatagaactagggagagcgtttacaatcaatagaaacttgggcttataaagaaacaagttgattattttctacatcgtttattaactatttgcagtgtcattgactagaaatcaatggaggtagaaaaatggattttaatgttatggattacctagcttaccatgcagatgtagctgttcctgctattattcttatggttattgtttctgctatatacttaattttttatggtatacgtcctataaaaacacgctttttgatcctttttctcttatctatagtctccctcataatcttcgtgctggataaccccctctattattatttgggaagtccattctcaggcttattatttgttttttactacctgatggtcttttcagtgttttatgtaccattctcactaatagcttttataaagagtcttctacatttaacacgctttcaaaccaattattcaatcttattagcgattaatagttttttcgccacattactggctttcctcaacctacttttcttacaaggggctttggaatttctcccaaattcatccatgtaccttatttttatcctcctagcggcaagtggtattgctcaaactataatagggagaaaggaaaacgaaaaaaataaagattatatggttgagtcaggaaaagacaatgtgaggtagacctatgttatctaaggtattaagttttttacttcactattctcaagtagtctttcctgtttgtgggggagcaatagcttatttaagcgtttataaaaagagaccaataaaaacacgctttttaaccctgcctatactagtagtggtaaccttccttctatctttgatagataatccattctcagatagaacctactcgggtttattattggctttctatcatgtctatgttttttctcccctaagtgttgcttgtagtatcacatcacttttaaaaagtatctatcattatagattgtttcgtataccgctagctactgttctcgtgagcaatggctctataatgaccggtctaacaatcttaaaccttatcttattctttggtgaactctccagctcattgacactatcttatctatttttcattttaattgcgataagcacagtagttcaatttgtgattggtgaaatagaaactaggaaggttaaaacgattctgatacagttacaaagtcaaggaaagacatagtaatccaaagtgtggtacaaatcttgaaaatagagggggattatcatgtccattctatgaagtctagtaagtttaaaaagtagaataggtgataagatgagaactgaacaggagatgctagatgtgattttacgtctagcgagagatttacaagtacaggctgtcgccttatctggctcacgaacaaatccgcttgcccaacaagatgactttcaagattacgatatagtctatattgtagataatctagatgatttaatttcagatttggtctggttggaccaatttggagaacgcatcatcgaacaacacaatatactgggggaacgtcatctctatctcatgctttttgaagatggcaatagaattgatttgaccctctgccccaaagaacacattgaagagtggctgaatagcgaagcaactttcacagtcttaaaagatgaacaagccttgtttgagccctatctgcccagttcgaagcgcttttggattactccgccatcagaagacgaatttgaggtatcttgcaatgaattttggtgggtgtcagcttacgtggtcaaagggatttgccgcaagcaactcatctatgccattgatcatctctacggcatttgtcagcaagaactcttgaaaatcttggcttggcaggtggcaagtgatagagagacggttgatatcggaaagaactacaaatttctttttaactatttgcctgctgagaaagagaaagaatttcaggcactacttgacttctctgaccagaaaaaactcaccaagtctctctttgctaccatggacttttttcataaagaaggccagaacctctctcgcaaagtcggcttctattatgacaaagaaactgcagagaagatgattgagtatgctaaggagaggctatagtaaatgaaaaaatacaaaaaagatgataactaaatttgtactaatatgttttttcatttcttagggacttgattggggcttactgactattctgactcaaatgaaacatttaagtttatcaagcccactgggcgtctttcttcatttactaggaggttttgttcctaccatctttggaaattagattctcctattggatttctgctttgatgataggttatatttaggcggtatgccatgcatctttatagtttgtgattggaagtcttcaaagtgagatgtcttttatatcctctagtctattcgcgattcagctaagtatttttggacttctattttctaaaagacgaagttagttctcatatgagtcatttatcttggtcttatacatacactactgagattacttgttattaaaaataatctgtcattcatagcaggactagtagttttacttgtttgggcacatttacttcaaaagaatatgaaaatcagaaaattaagctaactctcatcaatgaaaaactaagcaatttatttttaaactttaaactaaagaaaggataacttggttgcatatagtaactgaattcctttttccacaaaaactacgctacattctttgaaaggagttgaacacgccctagatgctgtgtggtaaatataaattctcttgtgagcatggctcactacactaaatttctatttttactttgcattttacgggctttgtatcctatatgagtaacattcaaaacatgtcccttgaggacatcatgggggagcgttttggacgctactccaaatacatcattcaggagcgtgcgcttcctgacattcgtgacggtctgaaacctgttcaacgtcgtattctttattccatgaataaggatggcaatacccatgacaagggatatcgtaaatctgccaagtctgttggtaacatcatgggtaatttccacccacatggtgatagctctatttatgatgccatggtgcgtatgtcccaggactggaagaatcgtgaaatcctagttgagatgcacggtaacaatggttctatggacggtgatccaccagcggctatgcgttataccgaggcacgcttgtcagagattgcgggctaccttcttcaagatattgataacaacaccgttccttgggcttggaactttgatgatacagagaaggaaccaactgttttacctgcagcctttccaaaccttttggtaaatggggctacggggatttctgctggttatgccacagacattccaccacataatctggcagaggtcatcgatgccgttgtctatatgattgaccacccatctgctaaactggaaaagttgatggaattcttgcctggcccagatttcccaacgggagctattattcagggtaaagatgagattcgcaaggcttacgaaactggtaagggccgagtagttgtgcgttcgcgtactgaaattgaacaactcaaaggtggcaaggaacaaatcatcgttactgagattccttacgatgtcaataaggctgtcttggttaaaaaaattgatgatgttcgagtcaacaacaaggttccaggcattgcagaagttcgtgacgaatctgaccgtactgggttgcgtattgctattgaacttaagaaggatgctgacagccaaactattcttaactatcttttgaaatatacggatcttcaggtcaactacaatttcaacatggtggctattgataatttcaccccacgtcaagttggcttgcaaaagattttatctagctacattgcccaccgtcgtgatattatcgttgctcgttcaaaatttgacaaggaaaaagctgaaaaacgtcttcatattgtcgaaggtttgatccgagttatctctattttggatgaggttatcgctcttatccgagcttctgaaaataaggctgatgctaaggaaaatcttaaggttagctatgatttttcagaagaacaagccgaagctatcgtgaccttgcaactttatcgtttgaccaatacggatattgtcactctccaaaatgaggaagctgatttacgtgaacaaatcgcgaccttggctgctatcattggtgatgagcgtaccatgtttaatgtcatgaaacgtgaactccgtgacattaagaagaaatttggtaatgaccgtcgttcagagttgcaagcagaaaccaagaccattgaaattgatactgcaagtttgattgttgaagaagaaacctatgtcagcatcactcgtggtggttatgtcaaacgtacaagcccacgttctttcaatgcttcaacgattgacgaagtcggaaaacgtgatgatgatgatttgattttggttcagcaagctaagacgacacaacacctcttgattttcactaatcaggccaatgtgatttatcgtccaatccatgagttaccagacattcgttggaaggatttgggagagcatttatcacaaactatcaccaatttatctaaggatgaagaagtgctttacgcagaaatcctggatgattttgaaacaggtacttacctagcagctaccaagctgggtcagattaaacgtttcgaacgcaaggaatttacgccatggcgtacctacaagtctaagtcggttaaatacgctaaactcaaggatgatagtgattttattgttacggttacgccaattcaattggatgatatcatgatcatcactcaaaaaggttatgcccttcgctttaatgctgacgaagtgccagtagttggtgccaaggcagcaggtgttaaggcaatcaatcttaaggatgatgatactgttcaggctgtctttgtggcaaatactcaaagtttctaccttctaacacaaagagctagtctcaaacgtgtagctacagccgatattccgcaggctaagcgagctggtcgaggtctccaagttcttcgtgagcttaagacgaaaccgcaccgtgtcttcactgcgggcccagtctttacggaaaatgctggtggcgagatagatcttctagcaacaccagtggaagagactcctcagaccttgcttgtaacagctacaacaggtgaaacggcagaggttgacttgtcccttctaaatctttcagaccgtactagcaacggtagtttcattgaaggattagcagacaaagaagtcttttctgccaagattattgaaagataaagataagaaagctttgttctcttattagagggcagagtttttttctttgatgggcaaaataagtgttttaaaaagaattgtcagaattttgcaacataaccttgaaattttcaatgaaaaggactatactagaaagcacatagtaacagaaaagaggatatacacatgacagttgatttagactgggaaaatctaggatttaattacagtaaacttccattccgttatatctcatattacaaagacggtaaatgggatgaggggcaattgactgaggatgcgactttgcatatttcagaagcatctccagcccttcactatggtcaagaagcttttgaaggcctcaaggcttaccgtactaaagatggctctattcaattgtttcgtccagatgaaaatgctaaacgtttgcaacgtactgcggatcgtcttttgatgccacaagttcccgttgacaaatttgtagatgcatgtaaacaagttgtacgtgcaaatgaagaatatgttccaccatatggtacaggtgcaacactttatctccgtccattgttgattggggttggtgatatcattggtgtgcatccagcagatgagtatatctttaccatttttgctatgccagtaggtaactacttcaaaggtggtttggctccaacaaacttccttatccaagatgattatgaccgtgctgctccacatggtacaggtgctgctaaggttggtggtaactacgcagcaagtatgttgccaggtaagattgcacatgatcgtaacttctctgatgtgatctaccttgatccagcaactcacactaagattgaagaagtgggttctgcaaacttctttggtatcacagccgataacgaattcgttaccccactcagcccatctatcttgccatctatcactaagttctcattgctttacttggctgaaaatcgctttggcatgaaagctatccaagatgatgttaagatttccgaattggataaatttgtcgaagcaggtgcctgtggtacagctgccgttatctcaccaattggtggggtacaacatggtgatgacttccatgtcttctattcagaaacagaagtaggtcctgtaacacgtaaactttatgatgagttgacaggtatccaatttggtgatgttgaagcaccagaaggatggattgtcaaagttgactaattcttaagagataaacgattattttaaggcttgctcttgcaagcttttttctttttcggtagaattaagaagatacattaagaaaggatggctcgagccaaggatcgggtataaatctatgagtaaaaaagataaaaaaattgaaatccaaattaatgatgctaaagtagtcgtcaataaagcaactatcgaaggctttgaacttctggttggtaagaaagtcatcggacaaattgtggaaattgatggtaagtttgccgttgttgacaaggaaaatgttgtaggtttccacaaaaaaatggatgatgcagtagctgccattattgaatcatacaatcttaatcattaaaatccaaagtaaaggcttgctttggtcaagaaactgtgatatactatttcttgttcttaaggagagatagcgaagaggctaaacgcggcggactgtaaatccgctccttcgggttcgggggttcgaatccctctctctccatgtctaagaaactgaatcgggatagtcgatatcaagtacttagatgtttttttatagcattttgctattggggtatagccaagcggtaaggcaagggactttgactccctcatgcgttggttcgaatccagctaccccagtaaaaggtatcgggtgcattggcaccgtctatgttaaccattgtctttgcgggtacctttaaaaatatattgttatcaagggtcagaattggctggctcttgttggaggatctttttagaatgaacgaatttgaagaattgctaaacagtgttagcgaagttaacacaggtgacgttgtaacagctgaagttatctcagtagataatgatcaagcaaatgttgttatcgaaggaactggtatcgaaggtgttttgacacgtcgtgaattgacaaacgaccgtgacgcaaacgttgcagaccttgttaaagttggtgaaacacttgaagtgcttgttcttcgtcaagttgttggtaaagatactgatactgtaacttaccttgtatctaaaaaacgcttggaagctcgcaaagcttgggataaacttgttggtcgtgaagaagaagttgttactgttaaaggaacacgcgctgttaaaggcggactttcagttgaatttgaaggtcttcgtggatttattccagcttcaatgatcgatactcgttttgttcgtaacactgaacaatttgtaggtcaagaatttgacgctaaaattaaagaagttgatccagctgaaaaccgtttcatcctttcacgtcgtgaagttgttgaagcagaagctgcagaagctcgtaaagaagtcttctctaaacttgaagttggttcaatcgtaactggtaaagttgctcgtttgacaagcttcggtgctttcatcgaccttgggggtgttgacggacttgttcacgtgactgaattgtctcacgaacgtaacgtttcacctaaatcagttgtatctgtaggtgatgaagttgaagttaaagttcttgctatcgacgaagaagcaggacgtgtatcactttcacttaaagcaacaacacctggaccatgggatggcgttgaacaaaaacttgctgctggtgatgttatcgaaggtaaagttaaacgcttgactgacttcggtgctttcgttgaagtattgccaggtatcgatggacttgttcacatctcacaaatttcacacaaacgtgttgaaaatccaaaagatgttctttcagtaggtcaagacgttactgttaaagttcttgaagtaaatgctgatgcagaacgtgtatcactttcaatcaaagctcttgaagaacgtccagctaacgctgaaggcgaaaacaacgaaaaacgtcaatcacgtccacgtcgtccaaaacgtcaagaaaaacgtgactacgaacttccagaaactcaatctggattctcaatggcggatcttttcggagatatcgaattgtaagataaaaaaagaggcatggaaacatgtctttttttctattttagagtatgctataatagtatactgttagcacccttagtgtaatggatatcacgtaagattccggttcttgagataggggttcgattcccttagggtgtaaaaagaaaagcgttgaaagatttgttctctcaacgttttttagtcggtaagttttagtgaaagtatttcataaaatcttttatcattgaaagggaaaagacaagcatacagaaaaaagcttttagcttgtcctaaaatcaaagaaaactaacgtattagcctctccatagttgatttattggggagacagtttggctaatcttttgcaatttattaaaaaatttgctataatacacagtatctcatattggggtcgttacggattcgacaggcattatgaggcatattctgcgactcgtgtggcgacgtaaacgctcagttaaatataactgcaaaaaatactaattcttacgctgtagcagcctaaacacctgctcgcgtgacttctagcagattgcttatgtttgtttagaggttttattgatttataagctacgtttgaccattgcctagctggttgaaaagagatttataggctcgcagatagaaggcttgagttatgtgtcgtctatctgttaaatgaaagacataacctatggttgtagacgaatatgttggcaggtgtttggacgtgggttcgactcccaccggctccataaaaaccagaggcgtcagccttttatttgtatatataggaatttattatgaaaaaacttttgtctttgaccgttttaggtctctcactttttactctagctgcttgtggaaaatcttcgtccaagacagagacgaagggatctttggataatgaagcctcaaagattttaaccgttaagcatgggaatgttcgccagaactttgataagattaccatggcaaatgcttctcaggaattttcaggaggctcaaatcttgatagcttgaagggttggtttggtgaaccttcatcaacgagtcaggagcaggcaggagatgctaagcttgatgtttataattggcagtatgacaatgttgttgttacagcgaaactctttaacaatagcactgtggttaagtcaatttcaaacttttcttacgtccgtgatcctaaaatcacattgaagatgtacgaaaatctcaaaaatggaactagctatgacgatgctgtcaaaacgcttggtacaccggatgtttattcgattgctgtttcttcagatgcaacaatgacacaagcactttggtcttcgaaccttgttgctaagaagggtgaaacaggtagccttacccttaactttaaaaatggtgccttggaaaacaagtcacaagcgaatttgattaacaagtaatcacagtaaaagatgcctttctaaatcaatgaaggcatttttttgttataataaaagaagtgattaaaattgtggagatgtagtgaccaaaaaaagactattttttatagggatagccggtttaatactggtattcttatggcctcttttaaataacttcatccccttaatcaaggaatggactaacgctaagcatgatcaagcctttttaagagaagtttttaagcaggctaatttccaaaatgcactgatccttcttagtctcatgattctgtcatcggctattcctggagtttcaagttctattttttgtatttttgttgggctactctatggccctttgcttgcgattccgatgaatattattgggaatacttttgggaatttaactagttttgaaattctgagaagacttgaaaagccggagaagtccaaacgcatggagaaacttctaaactatattgagaactttaagcatcgctttattgggatttcactggccttctctattccatttataccatcagctctggtcaattatgcttgtgttcagatgaatctacccacaagaacgaggattttggcgacacttattggagtgacgccagtatcgattgtttatgcagttagtggagatttgttgcttaatatccgtccaatccgaatgccattagtggcagtacttgccatcttgctttttatctcactcgtcatttactttatccattttaggaaggaaaaaaatgagcttcattcaagtaactaaagaagaatttaacacacatgctcaacaagtgtctgagcgttcttttatgcaaactgaggaaatggctaagcttcttgaaaaacgtggatttagcattagctatgtcgcttggaaagaaggagaccagctagaagtctcagcaattgtctacagcatgcctatgactggtgggcttcgtatggaggtgaattgtggaccgattcactcaaatgcagctcatctgagcgacttttaccaaggtttgaaggattatgctaaggaaaatggtgctcttgaactattaatcaaaccttatgatacttatcaaacttttgacagtaatggtgaaccaactagtgatgagcagaagcagctgattagtcaattgactgatttaggttatagctttgatggtctacagacaggctatcctggtggtgagcctgactggcactatgttaaggatttatctgggatagaagaaaaagatcttatcaagtctttcagtaaaaaagggaaacctctggttaaaaaagccaaaacctttgggattaagttgaaaacactgaaacgtgatgagttatctattttcaaagaaatcacttcagcgacctctgaccgtcgtgagtatagtgacaaatctctagattattatcaagatttttatgatgcttttggtgacaatgctgattttatggtggctaccttgaattttcaggattactatgaccatttggaaagtgatcaggcgaagttgggggctagaattgtcaaattacaagctaatttagaagctaatccaaaatctgagaaaaaacaaaaccaattaagagagttatcaagtcagtttgagacctttgatgttcgaaagggagaagcgactgcctttattgacaagtatggtcaggaagatattgttctggctggaagtctctttgtctatacacctcaagaagctgtttatctttttagtgggtcttatccagagtttaataagttttatgcgccagcactcttacaagagtatgtgatgacccaggccattaaacgtggcattacgttctataacttccttggtattatggggatctttgatggttcagacggggttttgcgatttaaacaaaactttaatggttacattgttcgcaagatgggaaccttccgctattatccacaaccgcttaaatacaaagcgattcaaggagttaagaaactgcttggacgttcttaaattttagaggacttcgatttgagtcctctttcattataagtctctatatggacttggaccattgtaaagagagattagaaattagggaggtaagttgatgaaacttgcactattgggtacagggatgattgtgacagaggttcttcctgtgttaacaactattgagggcattgagcttgaagctatcttgtcgacaccacgctcacttgataaggctgaagccctagctaagcaatatggtttgtctcaggcgactagtgattatgaggcaattttgtccaatccagaagttgatacgatttatgtgggaacgcccaaccatacccactatgactatgctaagaaagcgcttttggctggcaagcatgttatctgtgagaaacccttcaccttacatttggaagagtttgaagagctagctaagcttgctcaagaaaaagagcttctcttgatggaggctattaccaatcaatatttggctaattttacagcgattaaggaagccttgtctgatattggggatgttaagattgtgaatatcaattattcacaatattcgtcacgttatgatgcctttaagcgaggagagattgctcctgccttcaaccctgaaatgggtgggggagcacttagagatttgaatgtctataatatccatctcctggttggcctttttggaaagcctaatcgtgtggaatatctacctaatgtggagcgaggagtagatacgtcaggaattctagttttggactatggtaactttaaggctgttgccattggagctaaagactgtagtgcagagattcgttcaactattcaaggggataagggagctattaccatttttggtgcaaccaatactcttcctgagattggagtcactctcaatggtcagaaagagagaacggttaatcttaatagtccacaacatcgtatgtatgatgaatttgtggcttttgaaaagatggtggctaccaaggattttgacagtgttgccaagcagttggaacatagtcgtcaggttatggaagttctggatcaagcttcgaaagctttgtaacatacaaaaaaacaagcagtggtattagccattgcttgttttgtcttatacagttgttgggaatgagatctcaatcaatttgtcagtgtgtactgttctgagtttgtccatcaaaacgatatccttgtcgatttttcgtttgaggaagaattcacggataacttctaattcattgtctttaacagcacggtgtttatttgaaatcaagagttcataatgcttaggtgcttgtgtaaagacaacatcagtatttccagcagagtaggtctctacgagaaaggcatctgtattgtctagttggttttgaacgagttcttggtgtgtacgggtcgtattaatgagtttcatagtttcctcctaggatttgccagttgttgtgttagtttctttccattgttcgattccccatttatgactgccacgtttaagtttagcgatggcttcatcaattggaaaccaggccaggttattgaaatcttcgagaggtttgccaatttttgaaaaatctacaacttcataaatataggctggattgtaatagtaagtgtcacggtggcttgaatagaagtattcatcggcctggccatagtactggcctaaagtggctgtaaacccaagttcttcaattaactcgcgttctaatgcgctatagtgatcctcgcctgcttcaatctctccacctgggagaaaccaagccccgttaggagcctggactaaaataatctttgtcttttcttggttaggaatcacagcataaacaccgtaacgtgtttgataatgagctccctcaaccttgtcaccaaatgttggattcatgagttgctccttacgtttatttgcctatattatactaaaattttgctcattttcctattgatttaggcagaattagggataaatttgaaaataggaaatgaaaagataaagaaaccaagtcattgcgacttggtttctttatttaatcagttccttttgctgtctcagctttctgagcagttttttcggcttttttagcagacttaatggtgatgtggccttttgaagtcatgactgccttgagatctttttcgtttggattttcaaggtagaagtcagtaatagcgtcttcaatatgatcttggatggtacgacgtagtggtcgagcacccatcttaggatcgtaaccaaggtcaaccaatttttccttaactttctcagttacactgaggtggataccgttattagccaagcgttggttgacattatcaagcatgaggtcaacgatagtaaggagattttctttgctaagggcagagaattcgataataccatcaaatcggttcatgaattcagggctgaagaaatctccaagctggttaagcacagaattggtacgattttcacgggcagctccaaagccaacgctagcttctactttacctgtaccagcatttgaagtcatgatgatgatggtatccttgaaacttacagttcgcccttgaccatcagtcaagcgaccgtcgtcaagaacttggaggaacatgtgaagaacgtctgggtgagctttttcaacctcatccagaagaatgagtgaataaggattacggcggactttctcagttaactgaccagcttcgtcgtaaccgacatatcctggaggggcaccgaccaatttagcgacagcatgtttttccatgtattctgacatgtcgaaacgaatcatactgtcagctgaaccaaagagttcaatagccaattgtttagagagttcagttttaccgactcctgtaggacctacgaagaggaagctaccaattgggcgatttggtgcacccaatccaacacgattacggcggatggctttggcaatcttatcaactgcggcatcttgtccgataacatgcgatttaagatcatcagcaagactaagaagttgtgattgttctttttctttcaaatcaccgacaggaatattggttttttgttccacaatggcttcgatatgtttttctgtgatgacaggcatatcttggtctttgatggtttgtttttgcatttccttgtatttggcaatttgatcacggaaataggcagctttttcaaagtcttcgtcacgagtagcttgagccttgaggttttcagcctcaatcaaacgtttgtcgatatctttaggatcaacaaaattgagggtcaaattcatcttcgaaccagcttcatcgaggaggtcgatggctttgtctggcaagaagcggtcttgaatgtagcggttggacaattctgcagctgcagtaatagcttcgtctgtatatttgacatggtggtagtcttgatatttaggttgaataccacgcaaaatagtgatggtttcctcaaccgttggttcatcaaccttaactggttgcatacgacgctctagggcagcatctttttcgatgatgcggtattcgttgagtgttgttgctccgaccagttgaagttccccacgagcaagggcaggttttaggatgtttccagcatccatattgccatcgccagcattaccggctcctacaatttcatggatttcatcgatgaaaaggataacatcttgacgttgacgaatttcttccatgagtttttgcatgcgttcttcaaattgaccacggataccagtcccttgaaccaggctaacgacgtctagacggataacttgcttaccttgaagtttttgaggcacgctaccatcaacgattttttgggcaagaccttcaacgacagctgtcttaccgacaccgggctcaccaatgagaacgggattattcttggtacggcggttaaggatttcgatgacacgaatgatttcctcgtcacgaccaataacaggatcaatgtctccacgacgagcgatgtcagtgatgttgatgccgaactcttcaagaagaccttgtggctgttgaggagcttgttggcgtggtcctcctggacggcctggcccttgtgtattgccaccgtttcctcggttaccaccttcttgtgttggaggtgtattgggaagatcgccgttagaagaacggaagttatttaggtcgctgaagaaatcatcgaagaagttggaacctcctgtttgattgaattgattgagggggttctctgggtcagatttcatgattttataacaattttgacagaggtcaacttgttgctgattaccgtttacattggtatacaaatgaatactagcttcattaaggttacagttttgacagagcatatcagtacctcttttctatctgaattgggaaagacctttattgaaaacaatcttggtcaaaaaaggtcaaatctatgactccattatagcatgcggaaggtagattgcaagtaaaaagcatctagatttggcactctcttaaaaagagtgctaacattgaattttaattcaaaaacgcttgtctaaaatgtataaatattatataatgtttttatattattcagaacgaaagagagatacctatgacacaagctaaatcatttttgaaagaaatcgactttaccaagcaggaacttgaggagttaatcgatttatctataaaatttaaacagctaaagaaggaaagaattccgcataaatatttagatggcttaaatattgccttgatttttgaaaaaacatctacaagaactcgctcagcttttacagtggctggtcaggacctaggtatgaatgtgacctaccttggtgctggagacattcagttaggtaaaaaagaatctgtagttgatacagccaaggtgcttggttctatgtttgatggaatcgaataccgtggttttaagcaagaagatgtcgaagagttggctaagtactcaggtgttccggtctggaatggtttgacggatacctggcatccaacgcaaatgattgcggatttcatgactttgaaggagcgttttggtagtttggaaggtttgaccatcgcctatattggagatggtagaaataatatggccaactcacttttggtcacttcggctattttaggcgttaatgtcaagattattgccccagaggtgctgcaacccgaagatgagattgtagccctagctcagaaacataataatggtgccgatttaaccattacagatgatatttcagaggtcaagggagtggatatgctttatacggatgtctgggtatctatgggtgaagaagtagactttaaatctcgtattgatttactcctgccttatcaaattaatgcagacctacttgccaagacggaaaatccagatgtcatcgttatgcactgtctcccagcttttcatgatctcaatacccaaattgggcaagaaatctatgacaaatatggtttggcagagttagaaatcaccgatcaagtcttccaaaaatacagtgatatcatcttccaagaagctgagaatcgtatgcattctatcaaggccattatgtacaattccttgaaaaatatttaaaattcccccatttttcccataagtgtgataaaataagtaagaaatacacaattaataggagaaataacatggaatcacatttggtgagaatcattaaccgtcttgaaatgatggcggctgatggtggtaatttgaaacgtaattttgaacgtgaaggagtggttgttgccgaagtatcatttagcaacgatcctgaaaatggtccagttttcacattgcgtgacgttgaagcacgtgaatcttattcatttgatagtatcgacttgattgcaatggaaatctacgatttgctttactaataaattattttggaactttacaaggttccaaaaatcagaatgcctgaaactatcgagtttcaggcatttttatcaggatgaaagcatgtggtgatgcttgtatggcttgtcaaaacagtcagtgtttcaactcattggcaaagcttttggcgtggtgtcgtcttggaaatacatgaggtgtattgcttaagagttttgctagctaggtctataacttagtttttatactgaaatatcgcatttataagaaaatactttattattatacagtcttctgatataatattgaagaatattagtaaggagtatctagatgaatttttcatttctaccacagttttggtcttactttaactatggtgtcttagtaacaattatgatttcggtctgcgtggtcttcttcggaaccatccttggggttttggtatccttggccaagcgttctggaatcaaacctttggagtggttggtgagcctttatgtttgggttttccgtgggactcctatggttgtgcagattatgattgcttttaacctcatccacatgaatcttccaactgtgcagtttggcattttgaaccttgatttatcacgtatcgttccaggtattatcgtcctttctttgaacagtggtgcttatatttctgagagtgtgcgtgcaggtatcgagtctattcctaaaggtcaggttgaagctgcctactcacttggtatccgtccatggaataccatgcgttatgtggtcttgcctcaagccattaaaaatatcttgcctgccttgggtaacgagtttgttactattatcaaggatagttcgctcttgcaaaccatcggggttatggaattgtggaatggtgcacaaactgttgcaacaacaacctacttgaccttgacaccgctcttgttcgctgccttctattatttgattgtgacaacggctatgacggcactcttgaaacaaatggaaaaacgacttggggagggacgtaaataatggcagaaacaattattgagattaaaaatcttcacaagtattttggtaagaacgaagttctcaaagggattgatctagatattaaaaagggtgaggtagtggttatcatcggtccttcaggatcaggaaaatctaccttcctgcgctcaatgaacttgcttgagaaacctacaaaaggtgttatttcctttgaaggtgtggatattacagataaaaataacgacattttcaaaatgcgtgagaagatgggaatggttttccaacagttcaacctcttccctaatatgacagttaaagaaaatatcaccttgtcaccaattaagaccaagggtgtttctaaagctgatgcagaagcaaaagccatggaacttttagaaaaggttggcttgaaagataaggcagatgcctacccaacaagtctatcaggtggtcagcaacaacgtattgctatcgcacgtggtttggctatggatccagacgttctcttgtttgacgaaccaacatcagcccttgacccagagatggttggtgaagttctatcagttatgcaagaccttgctaagtcagggatgacaatggcaatcgttacccacgaaatgggctttgcttatgaagtggctgatcgtgtcatctttatggatggcggtgtcattgttgaagaagggacaccacaagagatcttcgacaatactaaggaagatcgtaccaaggatttcttgagtaaggttttgtaagatattcattaagtatatatacattgtttgtgaaggctggaacttttccggccttttctttttgtgttctgcttttctagaatcattcttgtttaggataatattgcggaaaagatggataaatatgctataatgatgccatatcaaaaataataaagtaggtcaagaaatatgctcatatatgatgcggccttaaaaacgccttaccggattcttggcattaacctccctaaggatagtcttttacacttatctaacctagggttggctgccggtgaaacgattgaggtggtaactaagaccaaaaacagtgctattattatcgttaaagggagtcgcttagcctttgatgcgtcgattctggataagattgatttggcacctgccgaggaagatcaggaaaagatacctctttctgaattaccagttggacgttcggctattgttactgatattttttcagcaaatgaaaccaaacgacgtcttatggatatgggaattacaaagcgtactcgggtcttattgcgtaaggtagctcctttgggagatcctcttgaaattagcttgagagggtatgaattaaccctacgtaagtcggaagcgcaaatgattagtgtagtcatgctggatgagggagaggaaaaatgacagaaattgcgttaataggtaatcctaatagtggtaaaaccagtttattcaacctgataacagggaacaatcagcgtgttggtaactggccgggtgttactgtagaacgaaaaagtggtctggtcaaaaagaataaggatttagaaatccaggatttaccagggatttactcaatgtcaccctatagccctgaagaaaaggtggcgcgtgactatttgttgagccaaagggcagacagcattttaaatgtagtcgatgcaacaaatttggagcgtaacctttatctgacaacgcagttgatcgagacaggtattccagtcactttagcgcttaacatgagtgatgttttagaggctcagggaaaacagattaatgttgataaattatcttaccatctaggcgttccagtagtagctactagtgctctcaagcaaactggtattgatcaggttgtgaagaaggcggctcatacgacaacctctacagttgccgacattgcttttccaatttatgacgataaattagaagctgctatctcacaaattttggaagtcttgggaaattcggtgccgcaaaggtctgcgcgtttttacgccattaaactctttgaacacgatgctttagttgaggctgaactagacttgtccccattccaacgaaaagaaatcaaagacatcattcgaatcactgaggaagttttcaccgaagatgcggagtcaattgtcattaatgagcgttatgcctttattgaacgtgtttgtcagatggctcaaagtcatacggaagattttgctctgaccttgtcagataagattgataaaattgttaccaatcgtattttggccttaccaattttcgcaacagttatgtatttggtttatttcttatctattcagactgttggaaccatgtggacagactgggctaacgatgtgctttttggtaagtatgttccagatttggtaacttctggtcttgactatcttcaagttcaggactggctcaagtctttgattgttgatgggattgtcgctgggattgggacagtgctaggattcctacctcaaatctttgtgctctttatctgtttgggtgtgcttgaggacattggatatatgagtcgtattgcttttgttatggaccgtattttccgacgttttggactttctggaaaatcctttattcctatgttgatttcgacaggctgtggggtgccagcggttatgtctagtcgaaccattgaaaatgaaagggaccgtcgcattaccattatgacggcaaccttcatgccttgttcggccaagttggaaattattgccttgattgctggagctttcttccctagtaattctttagtagcaccaagtacctattttattgggatggctgctattatcctatcgggtattgctctcaaaaagacgagttttttgggtggtttaactagtccgtttattatggaattacctgcctaccactggcctaaagccatgtcagtcttgcgttatgcctttggtaaggctatgagttttgtcaaacgtgcgggaacgatcattttcagtttgacggttcttatctggtttatgtctaactacaactttaccctacatactgtagatacggaagctagcattttggcgactttagggaagggcttgtcttggatttttgacccacttggatttgggaattggaaggcaacagttgcggctcttacaggtttagctgccaaggaaaccgttgttgccacctttggtattctctatcataatagcagtgaggcgggtctggctgaggctctacgaggagattattcttccttagctgcctattccttcttgatttttaacttgctttgtgcgccatgttttgcggctattggagctattaagcgtgaaatggccaatcttaaatggacggttggggctatcggtttccaaacaggtctagcttattgtgtgagtttaatcctttaccagtttggtcaagtcatcctgtacggtaagtcaatgacaatttggacttttgttgctttcttgctgttagtgaccatgatttactttgttgttcgtaaaccacgtcagattaaggatcaaatcattagcttggataatcttcaagaagctcatatttaggtttaggaggaattgttatgtctacctttatcattgccttcattatttttgctttagctggtcttggcatccgtcactatatcaaaggaaaaggatcttgtggcgattgcgagtgttcttgtccggttaaggaagaaatgcataaggctaatcgctaataaaataatatatagaaaaatggtctcttattcatttaagagaccattttcttacgattgtaagaaatgtataaaggtatctaggttggaagtgtgatactataagatagataaataatctaaatttttaacaaaaaagggagatgtataaggaatggttttgaacaaagagattgtcctaattcatgggacctggtgtgatggcaatgtttggggagaatttgcgacaggtctacgtcaaatgggatataaggtgcatacacctagctttcgttaccatgacctaccttatcaagagtgcctagctaaagttgggactgttaccttgcaggactatcgagatgatttagtggctttgattgaaagtctagaccaaccaccacttattttgggacactctttaggttgtctggtggctcaaatggttgctgaaaaaacagaagtagctggtatgattctcatgggaccagcaccaacagcagatatctacgccttttatccaaccatgctagcttgttttggcaaacactttctacgctggggattttggaaaaaagccatgcctccgtataaaaaggagtttttcaagtattgcatgaatgaacaagaggaatcattgaaagaagaagtttttgctgatttggttcctgaatcaggaaaagtttatactcagatggctcttcattggtttgataagacaaaagcagcttacgttgactttagtcggatttcatgtcctgttctcgttatttcaggaaccaaggataagatgactcatcctaatattgctagaagaacagctaagaactaccgtgattctgttctcgtttccttaacaggtgcagatcacatgtatgaaagtggcaaataccagcagaagaccttgaaggttattaaggggtggagtcagcaaaatggttttgtggattagtcacgaaacataatcagaagaagttggaaggcaattccagcttttttagctttcatttgaaacgtctttttgaaaatttagaaaatttagtcacaaagagtcctcactatggtataattgaaaaaaagtatgtattggagaacacccatggcgataataatggatggtaaggccctagctgctaaaatgcaggatcaattgcatgaaaaggtagcacgtctaaaagaaaaggaatggattgtgccaggactcgtggtaatcatggtcggtgacaaccctgccagtcaggtttatgtgcgaaataaggaacgtgctgctaaaaaggctggcttccatagtcagacggtcaatctttctgagagtattagtgaggaagagttgattgaagttattgagcgctataatcaggatccacttttccatggtatcttggttcagttgccactgccgaatcatattaatgaaatgcgtattcttttggctattgatcctaaaaaagatgtcgatggtttccatcctatgaatactggtaatctctggaatggtcgccgtcaaatggtgccttgtacaccggctggaattatggaaatccttcgtgagtacaatgttgaattggaaggtaagacagcagttattatcggacgtagtaatattgttggtaaacctatggctcagcttcttctagaaaagaatgctacagttaccttgacccactcacgaacaccgcatttggctaaggtttgtagcaaggcagatgtcttgattgtagctattggacgtgcaaaatttgtaacagaagaatatgtcaaagagggtgctgttgtcattgatgtgggaatcaaccgtgatgaagaaggcaaactttgtggtgacgttgattttgatcaagtgaaagataaggttggcatgatcacgcctgttccaggtggtgtaggccctatgactattactatgttgatggaacagacctatcaagctgctcttcgtagtgcgaaaggatagtttatgaaagttgatgacgatttagctaggcaagtgataacacctcgcttgagagagtctcacaagggttcttacggtcgagtgcttttagttggtgggctttatccttatggtggtgccatcattatggctgccatagcttgtgtcaatagtggggcaggcttggtcacagtggctacggattgtgaaaatatcacagcccttcatgctcatctccctgaagccatggcttttgaccttagagagactgaaagatttcttgagaatcttagggcagctgatgtggtattaatcggttctggcctaggtgaagatggtgtagctagtcaggctatggacttggtgctggcaaatattagggcagatcaaaatttggttgttgatggttcagctctcaatcttttggctaagaaaaataagaaggacttaccagattgtcaccttactctcaccccgcatcaaaaagaatgggaacgcttgtctggttttaggattccagagcagacagtttccaacactcaaaaagccttgggagagttccgagttgggacaatcctggttgccaagagtcacaagacggctgtctatcagggtgaaaaagtagctcatttagaagttggtgggccttatcaagccacaggaggaatgggagataccttagctggtatgattactggttttctggcccagttcgcttcaattgatcgctataaggctgttacagtagctacctggcttcactcagctatcgctgatgatctggctaaaaatgcctatgtggttttgccgactcttatcagtaaagccattcctagctggatgaaaaagttgtcattataatctaaaaaacgtgtcttgtattgaggcaagtttttttagatttcgacatttttttaagtttgctaaagcttatttgtgataaaataaaagagaatttttatgagaacatagaggaaaaaaagtgacatcattttcgaaaaaactcagtcaaaaatgggaaaaacggcgccaaaaacaaaaagaaaaacgagcgaataagcctagaaagccagtaaacatttcacgtcgtgtttacttgctttttggtgtagtctttgtcctttttttgttgctttttgcacgtttgacctatatgcaggtttataacaaatcgttttatactaagaaattagaggataactccaagtatacggttagaattgcaagcgagcgtgggcaaatctttgatgctaaaggggttgctcttacaaccaaccagagtaaggacgttattacctttacacgtagcaatttggtgtcatcagatactatgaagaaggtcgctgaaaagttagcgaccatggtaacactaacggagacgaaggtaacagcacgccagaaacgcgatttctatctagcggattctgccacctacaaacgtgtggttaatgaccttccaaaggacaagaaaacagataagtttggtaataaattagctgaagctactatttacaacaatgctgttgatgccgttcctgatgaagcagtggattacactgaggatgagcttaagattgtctacatttactcacagatgaatgctgtttctaatttctcaacagtcacattgaaaacaggagacttgacgcctgaacaaattgcgattgtagcagctaaacagaaggaacttaatggtattacggttgctaaggattgggagcgtcatacggttgattcagccttgtctcctctcatcgggaaagtctcaagttcagaagcaggtttgccacaagaagatgccaaggaatacctcaaaaaaggttatgcccttaatgaccgtgtaggaacttcttatctagaaaaagaatacgaggagaaactacaagggaaacatactgttcgtgagattacagtagacaaggaaggcgaagttgctagtgataaaatcactcaaaagggaagtaagggtaacaatctgcagttgaccatcgaccttgatttccaaaagggagttgaagatatcttaggtcaacagctttcttcagagatttcagagaacaaagctacctattctgaaggaatgtatgccgttgttatgaatgctgacactggtgctgtacttgccatggcggggcaaaaacatgaacaaggagcacaagattttaaagcaaatgccttaggaacaatcactgatgtctttattccaggatctgttgttaagggagcgaccctaactgctggttggcgttcaggtgccatctatggaaatcaggtcttgactgaccaaccaatcaacattgctggttcagcctcgattacgtcttggtttacagatcaaggtagccgtcctattaccgcgacacaggctctagaatattcatcaaatacctatatggtgcagattgcaatcaaactacttggccaacaatatgttccaggcatggccttgtcgactgacaatatggataaggccatgacgacacttcgtgatacctacgctgattttggtatgggggtatctacaggacttgatttgcctggagaatcagaaggttatatttctaagaattacaatgtagccaacgtcttgacagaagcttttggtcagtacgactcttatacaactattcaattggctcagtatgttgcttcaattgcaaatggtggtaaacgtgtagcacctcatattgtgggaggtatctatgatgctggcacaaatggtagcttaggaactctagcttcaacggtagatacacgtgtattaaataccttacctcttgattctgagcagatggggattatccaacaaggctttaatgatgtcgttaattccggttctagccttgcgactggtaaagctatggcaagttctatcattccaattagtggtaaaacagggacagccgaaacttatgcaacggatgcttccggtaactctgtaacaacggttaaccttaatgccgtggcctatgcgactgccaaagatggtacgaagttggctgttggaatcatgtatccacatgctctagactggaagagtaaggctcatcaaaatgcggtcaaagctatcatggaactttatcaaaatactcactaaatatgaaaatctcttgtgccttgcacgagggatttttctgtgatatagtgtttgagtatttgttcttgggtaaagacatatccatgacagtgacaaaagataagagatgaataaaatcatataaagaacaggaggccttcatgctttatcctactccaattgcgaagctgattgatagtttttcaaaactccctggaattggggctaaaacagcgacacgcctagctttttataccattagtatgtctgatgaagatgtcaacgatttcgcaaaaaacctcttggcagcaaaacgtgaattgacttattgttcggtctgtggtcgtttgacagatgatgatccatgtaatatttgtaccgatgaaaccagagatcgtactaagattttggttgttgaagattccaaagatgtttcagctatggaaaagattcaggaataccgtggtctctaccatgtgcttcaagggcttatctcccctatgaatggtgttggaccagacgatattaacctgaaaagtttgattacccgccttatggacagcgaggttgacgagattattattgccactaatgcaacagcagatggtgaggcgacgtctatgtatatttcgcgtgtccttaaacctgcaggaatcaaagtgactcgtttagcgcgtggtttggcagtcggttctgacattgagtatgctgatgaagtgaccttgctaagagctatcgaaaatcgaacagaactataagtaaaaagtgttggtcaggccagcacttttagtttgtagtaagtaggtttctcattaaaaatttggtaaaataaagtaagcgcttttttaatgagggatcatgatgcagaatgaaaagattttaaacaacaatgttgtccaagctttggataataatgtggaatacattgtcatgggtaagggactaggctttcaaaagaaggtcggagaccttgttgataaggaaaagattgaaaagacttttgttttggaaaatacagaggcagtagaggaatggtctcgtgtttatgtcaatttacctgatggtgaaatgcaggtctttttgaatatccttacttttgctgaggctgtcttgcaaaccaagtttgatccctcttttttcatcgcccttgctgaccacctacattacgctattgaaagaagtagagaaggtgtttctttgcagaatcccttggcttgggaggttcgaaaattttatcctcgggagtatgaaattgggaaacaagcccttcgtttgattgccaaggatttagaagtccagttggcagatgatgaggctgcctctgtcgccttacattttgtcaatgcacaaaaagatgcgggtctccatgaaaaagatcgacagatgactcaaattgtggttgggattagtgacattgtccgtcttcattttggttatgatttggaggaggatagtttctcgtataaccgttttatgacccatctccaatacctagcacaacgtattgtgagcggagttagtggtggcaagaatgatgctttcctttacgaacaagttaagataaattatccagagtcctttatctgtacccaaaagattgttgcttatatcaaggcaagttatgcctttgaactaagtttagacgaacaagtctttttaaccattcatattcaacgtcttaaggataatttagataagtaaacgattcccagagacgtcctacaaaaagcagacaattagccttaagtctgctttttctgtgtccttatggtataatgaggtgattaatgttagaccaaaaatactctgggctagtattctatgtatttgagtatttgtataaaaaaagctaatgagttagtgaaaggaagcgagcggttctatgcctgaagtgagcattgccgttcctaaagtatcttatgtatattgaaatgattgatgagactggacaagtctctgagaaattaaaagaacaaaccttggagttgctagattttgcagcacaaagacttggtaaggaagacaaggaaatggcggttacatttgtaaccaacgaacgtagccacgagctaaacctggaatatcgtgatacggaccgtccaacggatgttattagtttggagtataagcctgaattagatattagctttgatgaggaagagttggctgaaaatcctgaattagctgaaatgatgggagagtttgatagttatatcggtgagctctttatttctgttgataaggctcacgagcaagctgaggattatggtcatagttttgagcgtgagatgggcttcttggctgttcacggttttcttcacatcaatggctacgaccattacaccccagaagaagaagcggaaatgtttggattacaggaagaaattttgactgcttatggacttacgcgacaataatccacaaaaaaagtggaaaaacagagaatttacagctagttttgagtttgctctaacagggattatcacagcttttaaagaagaacgcaacatgcgcaagcacttggtttcagctatcttggtggtattggctggcttgatttttcgtgtgtctgcgacagaatggctctttcttttgatggcagtttttctcgtaattgccctagagattgttaattctgccattgaaaatgttgtcgatttggccagtaattatcacttttcgatgctagccaaaaatgccaaggatatggctgcaggagctgttctagtggtttcttgttatgcactcattacgggtatgattgtttttatacctaaaatttggcacttaattttcaattaaaaggaaataggaaagaagttatatgacatttaaatcaggatttgtggctattcttggccgtcctaatgtaggaaaatcaacgtttttgaaccatgttatggggcaaaaaattgctatcatgagtgataaggctcaaacaacccgtaataaaattatggggatttacacaactgataaggaacaaattgtctttatcgatacaccaggaattcacaagcctaagacggctcttggagatttcatggtggaatcggcttattcaacccttcgtgaagtggatacagtcctctttatggtaccagcggacgagccccgtggtaagggtgacaatatgattatcgaacgtcttaaacaagctaaggttccagttatcttggtaatcaataagattgacaaggttcatccagatcagctcctagagcagattgaggatttccgtacacaaatggatttcaaggagattattccgatatctgccctccaaggaaacaatgtttctcatcttgtggatgtcttgagtgataaccttgaggaagggttccaatattttccagcggaccaaatcaccgaccacccagagcgtttcttggtatcggagatgattcgtgaaaaagtccttcagttgacacgtgaagaaattccacactctgttgcggttgtcattgatgagatgaaacgtgatgaagacacggataagattcatattcgtgcgacaattatggttgagcgtgatagccaaaaaggtattgtcattggtaagcaaggttccatgctcaagaaaattggtacccttgcccgtaaagatattgaagtcatgcttggggacaaggtcttccttgaaacctgggttaaggttaagaaaaattggcgtgataaaaaacttgatttggctgattttggttacaatgaaaaagaatattaaaaagctgggcacttgctcggctttcttgttagaaggaggagcagatgcctgagttatctgaggtagaaactgttagacgagggttagaaagattggtagtaagtcggaccatttcgtctgttgaagttaaggtcccgaaaatgattaagacctcctacgatagttttttgaatgacttacctggccaaactattcaagccatgcgacgtagaggcaagtacttgatttttgattttggacagttgattatgatttcccacttgcgcatggaagggaaatacctcttgtttacggatcaggtccctgctaataagcatttccatcttttctttatcttagatgatggctcgactcttgtttatcaggacgtccgcaagtttgggacctttgatttattggctaaaaatcaagaggaggcttattttacaaagaaaaagcttggtcctgagcctactaagaaggcttttaaatacgccccgtttgagagagccttgatgacctctgcaaagcccattaaaagtctccttttggagcagaaattggtggctggtctaggcaatatctatgttgatgaggtgctttgggcagccaaggttcatcctgagacgccagcaaagaaactcagcaaggcagccatgaagcgagtccatgatcaaacgattgttattttacagctaggaattgaaaaaggtggctcaactataaggacttatcgtaatgcccttggtgaggatgggaccatgcagaactatttgcaggtttacggaaagacgggacagccttgtccacgctgcgcaagcacaattgagaaaatcaagttaggagggagaggaacacatttgtgtcctcattgtcagaaacgatgattattgggttaacaggtggtattgcttcaggaaaatctactgttgttgaaatgattaaagaggcaggttacaaggtcattgacgctgatcagcttgtacacgacatgcaggctcaagggggccgtttgtaccgtgccttactcgattggttgggagaggaaattcttctttctaatggggaattgaaccgtcctaaactagggcaactgatcttttccaatgaggagatgagacagcggtctgctgagattcaagggacgattattcgagaggaactagcagcgcaaaaggattatttagctaagaaagaagatgtttttttcatggatattcccttgcttattgagaatgggtatcaggactggtttgatcagatttggttggtggcagtgttaccggagatccagtgccaacgcttgatgaaacgtaatcacttaagtgttgaggaagctaagctgcgtattgatagccagatgtctttagctgagaaaatgccttatgccagcttggttcttgataataacggtagtctcgatgatttgaaggagaaggttaagagtgcaataaatgatttaacgagctcctcatagctagccattgtgatataatggatagtgaattttagaaagaagatgattatttgcgccaaaaagaacttaaaagtactgattggcaacgtaaccttaaaattgcatggataggaaccttttttactggagctagtttctccattgttatgcctttcatggccctatacattgaggaacttggtgttaaaggagacatggtcgaatggtatgctggcttgtctgttgccatctctgccttagcctctgccttggtttctcctatttggggacgcctggctgaccgttatggtcgaaagcctatgatgattagggccagcatggtgatgacttttacaatgggagggcttgccttagtcccaaatgttttctggctgcttttcttaagaacgctgaatggtttgtttgcaggctatgtcccaaatgccacagctttaattgctagtcaggttcctcagaatcgttctggctatgccttggggaccttgtctacgggtctaacggcaggtgttctgattggccctttgttaggtggtaccttatctgaggcgtttggtatgaggggtacctttttattggttggactcattctatttatctgctgcctcttaactatttttggcttgcgagaggatttccagcctgtcgaaaagggagagatgatgaccctttctcaggtttttgcaagaattcccagcaaatctatgttgattggcctttttgtgaccagtatgattattcagatttctgcccaatcgattgcacctatgttggccctttacattcgttatttaggtcagagggaaaatatccttttttactcagggttaattgtttctgctatgggcttttctagtctcttaagtaccccttatctgggaaaattgggagaccgtattgggaatcatcgcttgcttttaatggggctattttatagctttctcttgtatttcctctgtggttttgccggttcagccttgcaactgggtatcttacgctttgcctatggcttcggtgtaggtgctcttatgcctagtgtcaattctttattgaccaagatgacacccaaggaaggaatctcaagaatatttagctttaatcaaagcttttcatatattggacaggttttaggtccctttgttgggtcagcagttgcgacaggtctaggttatcgctgggtcttctttgtgactgcaatgattgtctttggaaattttgtctggtccttaatcatctttagaaaattgctaggagtcaagaatataggtgagagttaaaatcaatttaaagtgtagtgaatgtgggagcatcaactatctcacaagtaaaaataaacagaatcatcctgagaaaattcaggtacccaaattctgccctaaggatagaaaagtaaccttacatgttgaatcttaaagggttctatggtagaataaaaaggactttttcggaggaataactatgtacgacttattattaacgctgctcttggtgatgtcagctattattgtgattgcggtatttatgcagccacaaaaaaatccaagtagcaatgtctttgatggtggtgggtcagaagcactatttgaacgtagtaaaccacgtggttttgaagcctttatgcaacgctttacaggaatcatggtttttctatggattgtagatgcaatcgtcctttccattctctcaagtaagtaatgagctgactgaggttggctcattttttgcgttatagtcaataaataaaagaaaaggaaatcatgaaagaatctattataaattatttgaaggagcatgggaaatccagtgtaaacgacattgcccaggctcttaatcatgctgggggagaaaagttccctcagctcatcaaggccatgtcagccatggaaagtaagggacagttgcgttttaaccgagatggctctgtatccttgcgtcctaagaaagaaaatcctaatcaggtgactgttgaaggtatcttccgtgccaataagaacggttttggtttcttgcatgttgatgacagtgaagatgacatgttcatcggtcgtaatgatgttggccatgccattgacggtgatactgttgccgttgttatcaagaagccagcagatcgtttgcgtgggacagcagcagaagcgcgtgttgttgaaattgtagaacgttcgcttaagactgttgtagggaaatttatccttagcgacgagaaagaaccttatgcgggttacattaagtctaaaaaccaaaaaattcagcagccaatttatatcaagaaagaaccagttgccctagatggtactgaaattatcaaggttgatattgaaaaataccctaaccgtcactatgattatttcgtaggaagtgttcgtgacattattggtcatcagggggatgccggtattgatgtcttggaagtcttggaatcaatggatattgtttcagagtttccagaggatgtcatggcggaagcagaagctgtaccagatgcaccgagtcaggaagacctcgttggtcgtgttgacctccgtcaagaggtaacttttaccattgacggagctgatgctaaggacttggatgatgcggttcatatcaaacgtttgccaaatggtaactttgagcttggtgttcatattgctgatgtgtcttactatgttactgaaggatctgcacttaaccgtgaggccgtagcacgtgggacttctgtttatgtgacagaccgcgtggtaccaatgttgcctgagcgtctttcgaatggtatttgttcacttaatcccaatgttgatcgtttgacgcaatcagccattatggagattactcctaaaggtaaggtggttaatcataagatttgtcaatctgtgattaatacaaccttccgtatgacctacagtgatgtcaatgagatgttggctggaaatccagaaaagattgagcagtttaagccaatcatggattctgtatcagctatggcagaattgcataagattttagaagacatgcgtgagcgtcgtggtgcccttaactttgatacatctgaagctcgtatcttggttaatgagaagggaatgccagtggatatcgtggtgcgtgaacgtggaacagccgagcgaatgattgaatccttcatgttggctgccaatgaatgtgtggcagagcactttgctaaggctaagttgccatttatttaccgtatccacgaagagccaaaggctgagaaattgcaacgcttcatggattatgcctctatctttggtgttcaaatcaaaggaactgccaataagatggatcagctagacttgcaagagtttatggccaaagttcagggaaaacctggagcagaggtcatgaacatgatgctgcttcgttcaatgcaacaagcccgctattcagaacacaaccacggacactatggacttgcggctcagtattatacccactttactagtccaatccgtcgttacccagacctcttggttcaccgaatgattcgtgagtacactaacaatatgtctcaagaaacacgtgaacattttgaagaggttattcctgagttagcgacatcatcttcaactcttgaacgtcgtgccattgatgccgaacgtgtcgttgaagctatgaaaaaagcggaatacatggaagagtttgttggccaagaattcgatggtattgtcggaagtgtggttaaatttggtatgtttgtggaattgccaaacactatcgaaggtttggttcgcatcacgacccttccagaattttacaattacaatgaacgtaccatgacacttcagggtgagaaaactggtaagactttccgagttggtcagcctatccgtgtcaaattaacacgtgcggataaggaaacaggagacattgacttccaataccttccaagcgagtatgatgttactgagaaagtagaccacaaggctcgtcaggaacgtgaagagaaggcgaaagccttccgaaatagaggtccacgtcgtgaccgtcaaaatggagacttcgaacgtcgtggtaaacgtggggataaccgtaaccatcaagatgctaatggtcgtaaaggctcttatgacgaaaaacgtaagtcatctaagaaacccgacaagcgtaagaatcaaaaccgtcctcataatgataacaagggacgtgagagtggccgtcgtaagaagaaagggaacaaacctttctacaaggacgttgctaaaaaacgaaaataggatgagaatggagggactgctatgccaaagggtgaaggcaatgttgttgctcagaataaaaaggctagacatgactatagtatcgttgatactattgaagcaggtatcgtgctaacagggacggagattaaatccgttcgtgcggcacgcatccaactaaaagatggctatgcccaaatcaagaacggtgaggcttggttaatcaatgttcatattgctccttttgagcaaggtaatatttggaatcaagatccagaccgtacgagaaaattattgcttaagaagaagcaaatcaccaaacttcaaaatgaccttaagggaacaggaatgaccttggttcctcttaaggtgtacctaaaaaacggttttgccaaggtattgcttggtattgccaaagggaaacacgattacgataaacgtgagtctatcaaacgtcgtgaacaagaacgtgatattaaacgtattatcaagagtgttaaccgttaaaacgcctatcatctaagactgctatagtcctagatgattttttgtttttggctttaagacatgatataatgggagtaccatacggtctttagttaggatagcagatatacctaactctggacgtgatactgtaaaggagattagcgatgccagtagatgctaaaacaaaatacaaggccaagaagacaaagattgttttcttcgacattgacgacacccttcgtgtcaaaaagacaggctacattcctgagtctattaaggctgttttcaaagggcttaaagaaaaaggaattttgacggggattgccacaggacgtggctactatggtgtcgttgaggacattcgagacttagagcccgattattttgtaaccatcaatggaacttatgtgattaatcgaaaaggcgaagaaatttataaccagcccctagctcgtgaggttacagaagcctttgttgcttggtgcaaggagattgggattgcttggggctttgctggtaaggataagccagttgtttctgagcgttcagatttgattgatgatgctatgaaaccagtctatggtctttgtgatgtggagccagacttccacttgtcgaacgatgtttaccatatgtggacttttgcggaaaatgatggtgagcttgagttaccagaagaacttgcgacacatgtccgcttggtgccttggcacgaacactcctctgacgtcgtagcaaatggtatctcaaaagcatctggtgtcgagcatgtcttggagcacgaaaaccttaaaccggtcaatgctatgatgtttggtgatggtccaaacgatatggaaatctttgactatgttggacttaagattgccatgggtaacgctacaccagaattgaaagaaaaagcagattacgttacaggaacagtagaagaagatggcattttcaatgccttggaggaactcggattggtagaaaaagaacttcatttcccacaacttgacttggatgcagtagaaggtccagtcgtaacaattaaaacaaaccatggtgatttggtcatcaaacttttccctgatcatgcaccattaacagttactaactttgtcaatttggccaagagtggctactatgacggtgtgattttccaccgtattatcaaggactttatgattcaaggtggtgacccaactggtactggtatgggtggtgagtcaagtttcggtggtagcttccaggatgaattttctgaagaactctataacctccgtggtgcgctttctatggccaatgctggaccagatactaatggtagccagttcttcatcgttcaaacgcctgaaattccttatgctaaaaaggaactcgaacgtggtggttggccagcaccaatcgcggaagcttatgctgaaaatggtggaacacctcacctagaccgtcgtcacacagtctttggtcaattggtggatgaagactcttacaaggtgcttgatgagattgccaatgttgaggttggagctcaagataagccacttgaggatgttgtgattgaaacagttgaggtagcagactaagatgaaaattggagacaagcttaggggtgttatcacaggcatcaagccttacggtgcctttgtttcattggaaaatggtaccacaggcttgattcacatctcggagattaagacaggttatatcgacaacatctacaataccctcaaggtagaccaggaggtcttggttcaagttgttgattttgatgaatttacacaaaaggccagtctttctttgagaacccttgaggaagaaaaaaataaaatccctcatcgtcatcgtttctcagatagtcgtttgaactatggctttaaacctttggcagaagcaatgccaggatggattgaagaaggacttgactatcttagacaagagcatgaggaaaaatagcaaaaaaagctgactctcaatgagtcggcttttttggtgttttcgatttggctacaaacaaaaagatcttcaatttaattgaagacccatgtttattaattagacatcaaaatagatcaattcttttggtgtgtgtgtgaagacttcaaagccatcttttgtcacataaccacagtcctcgatacgaacaccaactttttcaggaatgtaaatacctggttcaacagagaagcacattccttcttcgattaccaagtcatttccttccatgatagaagggaattcatgcacatccattccgataccgtgtccgaggcggtggttgaagtattcgccgtaaccagctttttcaataacattacgtgctgcagcatcgacttcgctggcagttacacctggtttaatcatatctagggcagcctgttgagcttctaaagtcaagtggtagatttcttttttgaaatcatcgggttttccaacagcgactgttcgcgtcatatctgaagcatagccattcaccatacagcccaagtcgaagagaagaagagcatctttttcaattttgttgcttccaggaatgccgtgtgggttggctgcattgttaccagtcaagaccatagtttcaaagctcatttcatagcccaagcgtttgatgccaaattcgatttgagcaatgatgtctgtttcagtaacgtcgagagagatattgtcgaaaccgatattaacagctttatcagcataatcaccggcaaccaacattttttgaatttcatcagctgacttgataacgcgcattttttgaatgaatggtgtcaagttttcaaagcgaccatcaaagaccgtttgcaatccttggaacttagtcacattgagattgtcaaactctgcataaataatagggctgtctgtacttgctaggccagctttgattttttgccatggattttcagaatccacatatccaaagactgggaagtcgagtacagcagaggcacgtgcaacctcaagagcaggaacaaagagggcaggttcacgattttcgtagacgaagaggaacatttggcgttcatgtgggtcacaatcaaaaccagtaagataattgacagttacaggatctgaaacaatagctagccctgctttattttcgttcaaaaaatgacgaatgcgatcaagtttagacatagaaaaaactcctttgtatttcttacactcattctgtcacttttatagggaaaatgcaagttgttttttggcttttcattaaatcatttactttcattgagacttttttaggctagttttgtaagcgatggatagtcttggaaacacgaaatgagaggcctttttctgaaatggctttcttcctcgtaaccataaagaaggaatccctttcatttttttgtaaaaaatcagtcaaaataattgaaagtgttttcagaatctgatacaattagaatgaataagtgagcgtaaaatgagaaaggaagtgtttttatgaatactgatgaaacaattactatatacgacgttgcgcgtgaagcaggtgtttcgatggcgactgtgtctcgtgtggtaaatggaaataaaaatgtaaaagaaaacacccgaaaaaaagtactcgaggtcattgatcgtttggattaccgtccaaatgcggttgcgcgtggcttggcgagtaagaaaaccactactgtaggagttgttattccaaatattgctaatagttattttgctactttagcaagggggattgatgatattgcaacgatgtacaagtacaatattgttcttgcatctagtgatgaaaatgacgatcacgaagttaccgtgattaactctctatttgccaaacaagtagatggtatcatcttcatgggttaccacttgacggaaaaaattcgtgcagaattttctcgtacccgtactccgattgtcctagcaggaacagtggacctcgagcaccaattaccgagtgttaacatcgactataaagctgccgttgaggattctgtaacgcaacttgccaagaataatgaaaaggttgcctttgtatcaggaccactaattgatgatattaatggcaagctccgtctagctggttataaggctggacttgaaaagaataatttgcgttacaatgaaggtcttgtctttgaagctaaatatagctataaagatggctttgatttagcacaacgtgttttgaactctggtgccactgctgcctatgttggagaagatgaattggctgcaggtctcttgaatggcctctttgctgcaggtaaatcagttccagaagacttcgaaatcatcacaagcaatgactcaccaattacaagctatacacgtccaaacctttctagtattaatcatcctctctatgatttaggggcagttagcatgcgtatgttgactaaaatcatgaataaggaagaacttgaagaaaaagatgttattcttaatcacggtattaccttacgtcagtcaacaaaataaaaaaggagttgggacataagtttgtctcaacttctcttttttagaaaaagggagaaccaatgacttttgaggatgcttattttaaaaagaaagtcctaaaacctgatagcctagaaccttttggttttacagctactgagcaaggctatgagttcagaaaaacactgatagctgaagaacttgaagctcgattgtttattgatttagaaggtaagttgacgggacaggttgtcgatagtgatcttgatgagccttatgatatcttcaggagtcctcaggctactggaacttacgttggtcaagtcagagaggcttatggagaacttctgtcacaggtagctgattcttgttatgaagatcaattattctcatctccacaagctaatcgcctggctaaatttttagctcaagaattttcagaccaagcagaccatcctttcgagaaagaaccaagctatctatcttttagagttgatggtaaatggtatgccttgttttttcctcttaagggagaaaaactagggcttgatggagaaaaggcagaattaacatatgatgtggttaacctcaaggttaatccgacgcaaatggataagctcttgaaaatggatggcgtttttcctagctaccatatgtccaagaagacctgggttagtcttgttttagatgagaccttgccagaccagactgtttttgagcttcttagtgaaagtcgttccctagtggctcccaaacatcttagaaaggcttcggagcctcattattggattatcccggtaaatttgaaatactacgatattggggatgagttttccgcaaatgaggagattctttggacacagaaagctagtatgcaaaagggagattttgtggctatctatattacggcacctaccaaggccatccgttacgtctgtcaggttttagaggcaaatatccctaatcaaggttatcgtgaagaggagagtattaaagagttgatgcggattaagcccttatacacttttaatgacactgactttgatagtgatagactaaagagtttaggtattaaaactgttcgaggtcctcgacatatgacggaagagttagttcaggctttatccccttacctaaaagaaaaatagaaggaggacatcatgcgaattttgattgcacctgattcatttaaggaaagcttatctgcaaaagaggtcgccttagctattaaatcaggctttgaaaatgccttacccgacgctgattttgacctcatgccaataggggatggtggcgaaggcaccttagatgctcttgttgaaaatctaaatcttgagaagaaaagtatcaatattcctcatgcctatacaagtgatggaagtgtttcttttgccagcaatggccagactgccgtttttgaaatggctgcgatttgtggcttggagcatattcctaaggaaaaacgaaatcctctagctctaacgacacaaggcgtgggtgaactcattgttgatttggttcaatctggcattcgagagtttattataggcgtaggtggatctgctaccaatgatggtggtatcggtatggcatatggattgggttatcgtttttatgattctgagggacaggagcttgagccaataggtgctaatcttggtctcattaagaaggtatcctctaaaaataagcttgatttgtctggtgtcaccattcgtctgattactgacgtagacaaccccttgtgtggtcaatatggagcgacctatatttttggtgaacaaaaaggcttgtctccttcacaatttaaaaaagttgaccaagatatgtcacaattctacactgactttgctccaggagttttaaaactggctggttcaggggcgggaggaggcatggctgcaggcctggtggcctttgcaaatgcagaaattaaatcagggattgactttgtacttgattgtgttgattttgacaaacgtgtgaagtctgctgatttggttatagtaggagaaggacggatggatagccagtccttgtctggtaaggcaccggtcggggtggctaggcggacaccatcagctattcccgtcattgctatctgtggtagtttgaaggatgacttgcctgattttccagtagcaggtatcacagctgctttccctatcattggacaagtattagagttagaccaagttttagctaccgctaaggagaatctctatcgcacaggactcaatattgggaatgtcatcaagctcagtaaaacattgtgatataagaaaaagctgactttgcatcagcttttattttccgaatagtttagcaaaaaatccctttttttcaaggataggttcagtttcactaggagcaaggatatcaggatagagttctgaaaataacactttatcaagattctctgcttgattactatgtacgataagaccgtatggtgagtgggccttggcctcgtcaacgatagttgcagaaatatttagtgcttgagcggtcttgatataggtaaattgtgtctggtcggctaattttggcgaaagtttgagactaagattagggtaaacggctaataagtcttttaatatttgcggaaaattgtcaattacagttttcttttcggcattttccaatagaacagctaggactacacgttccgcataggttccaaaatactgacgaagttcatcgggattaaggcgtttttcgccactagcgcattggagcactttgttttcaagtgaagtcataggaatctcctgtaagttttctactagtattatacaatattttgaattccttttcatttgagtagttttctgagattttcaaaaacaattgaaaatattaaaaaatagaaaatcgctagaaaattctggttttaatttgcttaagccttgatattatggtaatatataggtgtaaaaaattttaactcataaggagagtattgtaatgtcaattattactgatgtttacgcacgcgaagtccttgactcacgcggtaacccaacacttgaagtagaagtttacactgaatctggtgcattcggtcgcggtatggttccttcaggagcttcaactggtgaacacgaagcagtagaacttcgtgatggtgacaaagctcgttacggtggtcttggtactcaaaaagcagttgataacgtaaacaacgttattgctgaacacatcatcggattcgacgtacgtgatcaacaaggtattgaccgcgcaatgatcgctcttgacggtactccaaacaaaggtaaacttggtgccaacgctattcttggtgtgtctatcgctgtagcacgcgcagctgctgactaccttgaagttccactttacagctaccttggcggattcaacactaaagttcttccaactccaatgatgaacatcatcaacggtggttctcactcagacgctccaatcgctttccaagaattcatgatcgtacctgctggtgcaccaacattcaaagaagctcttcgttggggtgctgaaatcttccacgcacttaagaaaatccttaaagaacgtggacttgaaacagccgtaggtgacgaaggtggtttcgcacctcgtttcgacggaactgaagatggtgttgaaactatcatcaaagctatcgaagctgctggatatgtaccaggtaaagacgtatttatcggatttgactgtgcatcatctgaattctacgatgcagaacgtaaagtttacgactacactaaatttgaaggtgaaggcgctgctgttcgtactgctgcagaacaaatcgactaccttgaagaattggttaacaaatacccaatcatcactatcgaagatggtatggacgaaaacgactgggacggttggaaagctcttactgaacgtcttggtggtaaagttcaattggttggtgacgacttcttcgtaactaacacagcttaccttgaaaaaggtattgcagaacacgctgctaactcaatccttatcaaagttaaccaaatcggtactttgactgaaactttcgacgctatcgaaatggcgaaagaagctggatacacagcagtagtatcacaccgttcaggtgaaactgaagattcaacaatcgctgatatcgcagttgcaactaacgctggtcaaatcaagacaggttcattgtcacgtactgaccgtatcgctaaatacaaccaattgcttcgtatcgaagaccaacttggtgaagttgcagaataccgtggtttgaaatcattctacaacttgaaaaaataattctatagtcatatagaatgaaaagaggttccttagggaatctctttttttgcttgttctaaagaacttttgactaagctaggcaccgtctctaaataggacttctagacataaaaagcccccgcaatcctattgactgcggggatttcgtcttagaatagacctttaatcttgtctaaagcgccactgaccatttcgttgcctgacacaagagatttagcttggtcgaagtactcgcccaaatcatctttgttttcatcgacaaactttttagcagcttcgaaatctttcttttcgatcatttcttttacttggttaaataattccattggattcatatcggttctcctttataagttttcttacaaatcctatttaatcacgcttatagcaaactagcaagaaatatgtttgagagtaactagtgagatgagagttgcaatttttcagccaagtggtattgaaacttgtttaatctaaaaaagcagtccatattggactgcctttaggggttattgttgttccgttgaagagctgcttggctctgattcacccgaacttgagctagagcttgattcggattctgcaggatgtagctccttgtaagatggggtcttgaatagatcagctgttgatttattgcctttttgcttgtagaggctagttgatttatctttcagctttttgttgatctgtttcagttgatccatctgtttagtgtaggaaattttgctagaatcaacaggtttcaaaccatttggcgtatagaaacgaaggaggtcacctgtttgaacagcgtcactcattgaaagctgagtggctactgccttacgaatggcttcgttatcctttttagtcgtttcatcagggttggtaatttcttcccctgtttgagtattatagagtcgaccagaatagctagtgtattgaggagtaacatattgacctgaggttctaaatgcgacaatttgcttgttatcaggagataggaggtcttgtcccatctggatataagagctagtgtcaacaccaagaatgtgaaggagagttggaagggcatcgacctcaccgccaaaggtgttagagatgccaccaccagtatatcctggaatatgaatcatgtaaggaacacgttgaagcatggccttatcatagtttgaccaagtttcagggttcttaccgagaagttcagcaagattgctgcttcgtgtatctgagataccatagtggtcaccgtacatgacaataattgagttgtcgtaaagaccggtttccttaaggtaatcaaagaagtctttgattgctgagtcaagatagttagctgttgcaaaatatccgttgactgtctcatcttttgtttcagcgagtgggaaaccttgttccttttcatcgcctgagagtgaagtgtatgggtagtggttagatactgtaaggtatttaacgtagaaaggttgttgcatttgttccagatatttgatggaatctgggaacatgtacttgtcatttagaccatactggaatgagttttcatcagttttttcagtgaaggctgatgagtcaaagaagtaattataaccccattgtttataggtgttattacgattccagaaggatccagtgtttccgtggaaaacagctgacgtatagccacctgtttgagctaggatagatggtgcagcataggctgtattggtaccaccatagtttaccatgtatgagcctgtgcttagtccaaagagagacgtttccatcaaggtttcagcatcagaagttttccctgatttaacttggtggaagaagtttgaaaaggctagcgtctcgtttgagtggtaaatggaattgatgaatggtgtaacctcatattcttgaccgtctactttgagcttgtagtcaataaggaactgttggaagctttccaagtgaataacgatgacgtttcttcctttagcaattccgtaatacttaggatcaggtgccgcgtagtgctccttaacgtaagcctcaacctttttcatatcctcagctgttgctgatgaacgagcctgtgaggcctgataagttaagttaccagaataggctgtgaagaagggaatccccatagcacgaacaatatagttatttgagaaaccacgtgtcaacaactcgccacggttaacttccgctaagaagaggttaactgagagaaggagtgtcgacagtgcagtgacggcaaaactagctcgtttgttaaatggcttgctgtccatcttaagcttcttcctgaaaccagcatagatgaagaaaggtacatcaatcaggtagaagagatagcttggctcaagaaggttcttggcggagtctcctagtcctgctgccgaactagaacttgctaggatggtatttacagtgatgaagtctgtaaactctccaaagtaaatcacattagcaataagtaagaggttaaggatgacatagatagcaatggtaatgctataaaagaaacgtcgtttcttaaagtatagtcctaaacctagaagcattaatcctagtggaatagggttaatcagcgaaagcataacctgatatctgctttccaactcaagattaatgttgacgtaataagcgaatatggtttttagccagtaaaagaagagtaacaagaggataaatccaagtcttgatgaaactcctttccaaaaggcttcattaatttttttcaaagtaatacttcctttgattctatattatcttaatcattataccaaataagataatgactctcaaaaatttactgccattgagtgtgatattccttgacatataattgataaaatctagttacgaaacagaaataatagcatttttttggtataatagtaacatgagtatattgacggtaagtccctttgcggagaaaaaaatcaaacaaggaaaacagcttcttttagcagaagattttccaaatatcactgaaaataatcagttggtttacctttatagccagtccaaagattttttaggaacgggctatttgtcaagtcaaaataaggggataggatggtttctgtcccctaataaagaaaaattgacagtgacttattttcaaggactttttgaaaaggctaaggccaaacgtcaatcctattatgataatgagttgacgacagcttttcgtcttttcaaccaagatggtgacgattttggtggactcacaattgatttatatggggattatgccctcttttcatggtacaatgcctttgtttattccttgaaggatgttattgtagaggctttccaaacggtctttcctgaggtcttgggaggctatgagaaaatccgcttcaagggtcttgatttcgaatcagaccatctttttgggcaggaggcggctgataccttcaccattttagaaaatggggtctcttatgaagttttcctcaatgatgggctaatgacgggaattttccttgatcagcatgaagtgcgtgatggtttagttaatggcctagctttgggtaaatcagttttgaatatgttctcctatacggcagctttttcagttgctgcggctatgggtggagcggttgaaacgacatcagttgatttggctaagcgttcacgtgaattatcgacggctcattttgaagctaatggtttcagtatggacaatcatcgcttggtcgtgatggatgtcttcgattatttcaaatatgcaaagaaaaaaggcttatcttatgaccttatcgtcatcgatccgccaagctttgctcgaaataagaaacgcactttctcagcaaataaggattaccacaagttaattgcacagagtcttgatattttatcagagcatgggacaatcatcgcaagtaccaatgctgctaatatgaccgtgcaacagtttaaaaaacaactccgtaagggcttgggagatgtttcagcggacttcgttaacctgcaacaattaccagcggattttaccgtcaatcctaatgatccaacatcaaattatttgaaagtatacacaataaaggtaaataaatgaaaattgtagttccgattatgccaactagtttagaggaggcacaagagcttgaactgtctcgttttgagggggcagacattatagaatggcgtgcagattttttagataaggatagtatcttaacggttgctccagctattttcgagaaattcgcaggctttgagattgtctttaccatccgtacaacgcgtgagggtggcaagcttgagttaacggatgcggaatatgtcgcactaattgaggatgtcgctgctatctactcgccagattatattgattttgagtatttcactcgtaaggctgtctttgaccaaatgctggatttttcaaacttggttttgtcttatcataactttgaggagacacctgaaaacctcatggagcttttgtcagaaatgacaaacctaacgccaagggtggttaaggtggcggttatgcctaagcatgagcaggatgttcttgaccttatgaacttcacacgtggttttaaggcctataatcctgagcaagagtttgtgaccatgtcaatgggtaaactaggtcgtttgtcacgttttgcgggagatttggtggggtcatcatggacctttgctagtcttgacaatgctagtgcaccgggacaagttggtcttgcagatatgcgtagaatcagggaggttttggatgcagattgatggacacacacgcctagcagctgttgtcgccaatccaatcaagcattcgatttcgccattcattcataattcggcctttgagaagacacaagttaatggtgtttatgtggcctgggagattccggaatcagacctagccgagacagttgaaaatattagacgttacgacatgttcggtatcaatttgtccatgccatataaggaagcagtcattccttttttggatgagattagtcctgcagctcaactgattggtgctgtcaatacagttgttaatcatgatgggcgtttgattggtcataatacggacggttttggcttttttgctagtttaaagaactttagccctaaagatgcccatctgatgattttgggtgctggtggtgcggctaaagctattgtgacgcaggcagttcttgatggtgccaaaaaagtaagtgtctatgttcgccctcagtcattggataaggcaaaagagagctttaagtccttacctgaacagacaacttgtcacttggagtttcatgctttaaatgatcttaagtattttaaagaggaactaggccaggctgatttattggtgaatgcgacgagcgtaggtatggatggcgcatccttgcctattcctacagatacaaaatttcctaagggactcttggttgctgatatcatttatcagccttttgaaacacctttcttggccttggctagaaaacagggaatagaggctgtgaacggacttggcatgttgcttcatcaagcagcaggtgcctttaaattgtggacaggcaaggacatgccaacagacgctatttggcaggaattagaaaatatttacaatagctaggaggggacgactatgaaactagaggtaaatttaacacataacccttatgacattattattgaaaaaggagcccttaagactgtcggtaaatgggtgaagtcactttgggaaccacaaaagattgcccttattacggacaatcatgtgggagctctatatgcagaaaaagttaagcttagcctggagcacgaaggttttgaggttgtcgtttttgatttcctagaaggtgaagcgagtaaaaatcttaagactgttaacaaggcttatgagtttttgattaagaatggcatgactcgtagtgatggcattgttgctcttggtggtggcgttgttggtgacttggcaggctttgtcgcttcaacctatatgcgtgggattcatttcgttcaggttccaaccagtctaactgcccaagtggattcatctattggtggtaagacgggtgtgaacacaccatttgctaaaaatatcgtgggaacttttgctcagcctgatggggttttgattgaccctaatgtccttgagacacttggtaaacgtgaattgatcgaaggtatgggtgaggttgtcaaatacggtttgattgatgatcctgagctttggcagcttcttgaaagcattgatggttcggttcacagtattttggaaaactcagaaaccatcatttaccgttcatgtaacgttaagcgtaaaattgtggttgaagatgagtttgaaggtggtgtccgtatgtacctaaactttggtcatacgattgggcatgccgttgaacaaacagctggttacggtaaagtcatgcacggtgaagcggtagctattggaatggttcagatttcacgagttgctgaggaaaaaggtctgatgcctaaggggatcacacgtcaaatcgctgagatgtgtgttaaatttggcttgccagtagactatgagccatggtgtgttgaggagctctatacagccctcacacatgacaaaaaagctcgtggcaatagcattaagacagttatcgttccagagattggtaaggcagctatcaatcagattcctttagttgaaatgaaagagtacttggagaaataaatgagatatttaacagcaggtgagtctcatggcccacgtttaacagcaattatcgaaggtgttccagctggtcttcccttgacggctgaagatatcaatggtgatttgaaacgccgccaaggtggctatggtcgtggtggccgtatgaaaattgagtctgataaggttgaaatcacttctggtgttcgtcatgggaaaacaacaggggctccaatcacccttcatgttatcaataaggaccatcaaaaatggttggacatcatggctgtggaagacattgaagaccgtttgaaaaccaaacgtaaaatcactcacccacgtccaggacatgctgacttggttggtggaatgaaataccgttttgatgatttgcgtaattccttggagcgttctagtgcgcgtgaaacaactatgcgtgtggcaataggtgctgtcgctaaacgtatcttggctgagctcgatattgaaattgctaaccatgttgttgtctttggtggtaaggaaattgatgtgcctgagaatttgacggtagctcaaatcaaggaattggctcaacaatcagagatttcagtcgttaaccaagagcgtgaacaagaaattaaagattacattgaccaaatcaaaaaagaaggggacacaatcggtggtgtcgttgaaactgtcgttggtggtgttcctgttggtcttggttcttatgtccaatgggataccaaacttgatgctaagattgctcaagcagttgtatccatcaatgccttcaagggtgtggaatttggccttggtttcaaggatggctacctcaagggctctcaagtaatggacgagattctctggaatgaagaggacggctatacgcgtcgcactaacaaccttggcggttttgaaggtggtatgaccaacgggcaaccgattgtggtccgtggggttatgaaacctattccaacactttacaagccattgatgtcagtagatatcgaaacacatgaaccatacaaggcaacagttgagcgttcagatccaacggccttgcctgcagcgggtgtcgttatggaatccgtagttgctacagtcgtagccaatgaaatcttggacaaattctcttctgacaacatggaagaattgaaagaagcagtagcacgtcaccgtgcctatgtgaaaaacttttaagtagcatcagacaatagatgggagtagtaatgagtaagaaaactatttatatcgcaggattgggcttgattggtggctccttggccttagggattaaaagggaccaccctgattatgagattcttggatataatcgctctgactattctcgaaatattgcacttgagcgtgggattgttgaccgtgcaacaagtgatttcaaagaatttgctccccttgcggatgttattgtccttgcagtgccaattaagcaaacggtggcctacttgaaggagttggctgacctggatctcaaagataatgtcatcatcacggacgcagggtctactaagttggatatcgttgaggcagctgaacgttacctaacaggtaaaaatgttcagtttgtaggttctcaccctatggctggttcccataaatcaggggctattgcagctgacgtgacacttttcgaaaatgcctattatattttcacaccgacgagtctaacaagagagacaactatccctgaacttaaggacatcttgtcagggcttaaatcacgttatgtggagattgatgcggctgaacatgatcgtgtaaccagtcaaatcagtcattttccacaccttttagcttctggacttatggagcaggcagctgattatgcgcaggctcacgagatgaccaatcactttgcggctgggggcttccgagatatgacccgtattgcagaaagtgaacctggcatgtgggcttccattctcatgaccaatgggccagctgttttggatcgtattgaagatttcaaaaaacgtttggaccatgtggctgacttgattaaggctgaagatgagaatgccatttgggagttctttgacaacggtcgtaagaaacgtaaagagatggagatccacaaaaaaggtggcgtggaaagtgccttcgatattttcgtggatgtgcctgaccgagaagacgttatccttaacattatggaattgctgcgaggaacgtctttggttaaccttcgtattaatgaggaaaatcgtgaggatattcacggtatcctccaaattacttttaaaaatgaaaaagatcgcacacatgctaagactgttattgaagccaatacggattatcatgtggtgatcgcctaggagaataaaatgacaaatatttatgatttagcaaatgagttggaacgtggcattcgtgcccttcctgagtacaaaactttggtagagaaaaaagaagcgattgcagctgatgctgaagctagcgctcttttcaaagagtttactgatttccaagaggatttctatgctaaaatgcaagctggtacaatgccaacagcagaagaacaagctgctgttcaagaattgggtcaaaaggtagaagctaatgcccttttgaaagaatacttgactgcacaacaaggtttgtctgtttatttgaacgatattgaacgtatcatcttcaaacctttgcaagaattgaatagttaatcaaagagggtgtgtcaattgacaggcccttttctgcattcaaaagagattgtctaaggaagaagctagaaatattaaggaggaaaatgatgagtcgtaagattggaattattggtatgggaaatgttggagctgcagtagctcatggagcaattgctcaaggcttggctgatagctatgtctttatagatatcaatgagaagaaggccgaggcagatgcccaggattttaaggatgccatggcaaatctgcctagctatgcaagcattgttgtcaatgattatgcggcacttgaagatgctgatgtgattatttcatctcttggaaacattcagttacagcataatgctggtgaggatcgctttgctgaatttccatttactcgagaagccgtttatcaggtttctcaggcacttaaaaaattgaattttaaaggcatactcttggttatctcgaatcctgtagatgctgtatcagccctctatcaggaattcacaggcttgccaagagaacgtgtgattgggacagggactttactcgataccgctagaatgaaggcggcagtaggagatgatttgtcagtcaatccaaaatcagtatccggctacaatcttggcgaacatgggaattcccaatttacagcctggagtcaagtcaaggttaaaggtcaagacattacagaattgaccagcaaagaagaacgtcaaaatctgtttatgacttccatgaagggtggtcataaggttttttatggtaagggctatacttcatacggtattgccagtgctgctcttcgtttggtgacaattatcctttctgacgctcaagaagaggtggcagtatctagctatcaagaagcctatcaaacctatcttggctatccagtcatcctagggcgtcatggggtggctgctcccgttcacttgtctttgtcggctgaggaaaaaaatcttttgcaggagtctgctaacttgattcggaaccgtgttcaagaagcagttgcctttctaagagaaaagtatgccaatactagagagtgaatattttgacaattcagtctatggttgggctttcaaatatggtataatggaaataactataaaattttcaggagtaacctatgaaactagaaaccaaggcccaaggtcttcatggcagcttgcgtatccctggtgacaagtcaatcagtcaccgttctatcatgttcggaagtcttgccaaaggtgtgacaactgttcgtgatattttacgaggtgaggatgtcctctcaactatgcaggtcttccgtgatttgggtgtgactatcgaggatgatggtgatgtggtacgcattcacggtgttggttttgatggtctcaaggctcctcaaaacaagttggacatggggaactctgggacatcgattcgattgatttcaggtgtacttgcaggtcaagatttcgatgtagagatgtttggagatgattccctttcaaaacgtccgatggaccgtgtgaccattccattgcgtcagatgggtgtagaggtttctggtcaaacagaccgtgatttgccaccattgaaaatgcacggtagcaagtcccttaagcctattcattaccaattgccagttgcctctgctcaggtaaaatctgcccttatttttgcagctcttcaagctgatggtgaatctgtcatcattgaaaaggaaaaaacacgtaatcatacagaggatatgattcagcagtttggtggtcagcttcaagtagatggcaaggaaattcgtatttctggtggccaaagctttactgctcaagaagtcgtggttccaggtgacatttcttcagcggccttttggttggtagcgggactcgtggtgcctaactctaagattgtcttggaaaatgtcggcatcaacgagacacgtacgggtatcattgatgtgatcaaagatatgggtggtaagattaccctttcagatattgaccaagttgccaaatctgcgactattacggttgaaacttcagaacttaaaggaactgaaattggtggcgatatcattccacgtttgattgatgaacttccgattatcacactcttggcgacgcaagcccaaggtaagacagtgattcgtgatgctgaagaactcaaggtcaaagagaccgaccgtattcaggtggtggcagatgccttgaatgctatgggggctgatattgttccaacagaggatggtatgattatcactggtaagaccgctcttcatggagcagaggtcaatacctttggtgaccaccgaattggtatgatgacagctattgctgccctcttggttcaagatggtgaggttgacttgcaacgtgcggaagctatcaatacaagttacccaagcttctttagtgacttggaaggattgctcaatggctaaagttttattgggctttatgggagttggtaagagttccgtcgccccatacctggatggtcgtttcgtggatatggatcaggtcatcgaggagaaaatcggcatgtccattgctgatttttttgcaaaagaaggtgaggcagcctttcgtcagattgagtctgagactttggaagaacttctccaagagggagatgatgtcatcatctctactggaggtggtgtcgttgtaacggagcataatcgtcagctcttggccaagaatcgtaagcataacgtttggctccatgcttctttcgatgtggtctatgatcgcattcaaaaggataccaaaaatcaacgtccagtctttctcaatcattcaaaagaggattttaaggttatttatgacggtcgaatggcactctatcaagatttagcagatttggttgtcacagttgataaccgaacgccagaagaagtagcaaggtttatcaaatgtatgtaggttatttgggcccaagtgggtcgtttacacataatgcagccttaaaggcttttcctgaggcagaattggtttcattaggtaccattactgaggttatcaagtcttatgaagagggacgtgtggattacgcggtcattccggtggaaaattccattgagggctctgttcatgagagtttagactatctctttcatcaggccgatattcgtgctgtggcagagattgttcagcccatcaagcagcagttgatggccactaaacatcatgagaaaattgagaaaatcttctcacacccacaggctattgcccaagggaaaaagtatataaaacagcattttccacatgccaagattgagacaacagcaagtacagcctttgcggctcgttttgtcgctgataatccagatcaagcttatgcggcaatcgctcctcatgcagctgctaaggaatacggtcttcaaatattggctaaggatatccaggagattgaaaagaattatacccgtttttgggtgctggggaacacagttcccgagattccgctcaatcagattgattgtaaattaacgctggccttgaccctgcctgacaatatgccaggggcactgtacaaggccctatcgacctttgcctggcgaggcattgacttgaccaagattgaaagccgtccgttgaagacggtacttggcgagtatttcttcattattgattgtgattatacaaaggaaaagttggctcagttcgctcttgaagagctaactgcagttggaattggatataaaatcttgggtgcttaccaagtctatgaaatttaaagggaaatcttatgaccaaatctaacaatgggccgtttacgcatcatgaacggttacgttacagctatcttttaaaaaatcttgctcacctgaatggacagcaggcttcagaatttaattatctccaaggaaagttagatgcctatgaagctgagcggagatatcaagcgcaaagagaggactatcaagcagcatggcgtcagccttatgacaatcgttatgactactatcaagagcgtgattatgaggctgccaatcagctgacagaggaagggcttcccatctatcgagaggaagttgctcaaagtcaacctaaacgtaaaaaggttcaaagacaagcgtccccttcagcaacgtcggctccaaggtccaagtcgcaagtagcccagaagaagcgaccaaagaaaaagagaaggctcaagaaggttgttaagctagtacttagttgcttgagtcttggagttgtgttcctagtgatagccatggcctatcaattttacaagggaacagacctttctgccgcgggtaataatggtaaatcctaccagcctgccatagttgagacctttaatggtaaggataccaaggatggggtcaatatccttattctaggttctgaccagcgtgttagccaagaatctaccgatgccagaacagactccattatggtagtcaatgtgggcaataaagaaggtaaggttaagatggttagctttatgcgagacaccttagtcaatatcaagggggcttcagaaaccgactattctcaggacttgaaactcaatacggctttcaatattggtgagcaaaataatcatcaaggggcagagctcatgcgtgagacgctcaaacgcaactttgatattgatatcaagtactatgccatggttgactttgaaacctttgcgacaggggttgataccctcttcccaaatggtgtagaaatcaatgcgaagtttgcgaccatcgatggtaaaaaagtatcttcggttcaagttccagatgatttgaagatggacaagaacggtcacgtgccaaatcaaaccattaaagttggtaagcaagatatggatggccgcacccttctgaattatgcccgtttccgtaaggatgacgagggagattatggccgtaccaagcgccagcaacaagtgatgcaggctgtcatgaagcagcttaagaatccacttagcctcttcaaagggcctgaggctttggggaaggtctactctctaacctcaaccaatatgagtatgacagacatgttggacttgggactttcaaatgctggaagtttcaaaaaagggatcaattcgcaaaccattccttcagatggtgattggattgacagctatgatttgtatggcggtcaagggattgaaattgattttgacacttatcaggcaaaattaaaagaactaggatttagataagaaaggaagcaggttcacactgaacctgcttcttttttggtattaagagcttgtataagcgccttgtataagagttttagaaaatgatagagcaaataggtcatgataagaagaataatgacgaactctaccttataaatcaattgggtagctggattgactaaacccagacttgtggtagctgccttaaaagcattgacactattgaccaagggaaagctaaaagttgcaaaaagtggcataaagccttttctaaccagttttacaaagagattaagagcgtagaaaaagaatgcttgtgagaatagaagtagggcaagtaaaataatagttgcgggtctttgattactcttgattgagctggtgatgagaagggccagaggtgctgctaaaatggcaagtataggctgatatagatgagggatggctatctgtttcattctccataaaacaagtggaaagaggaccagagtcgctaatcccgttactcccagaataagtcccttgatgctagttggaacactagccggtactgtcacaagactgatagcagggccaacatagaccacgaaccagcttggaaagacttggttcaaagatagtgggcgcataaaacgcagactgaaaaagataatataggcaatataaagtccaaggagtccaatccaagtcacacttaagcctgtttgagctagtgggaggtggctggcaaatagaaaagcagccataaagaaactagcaaaggccgaagcaacgactgggtttcgcaaatcttctcttatttgttcaaatccaagaatcaagcgtcccagtataagtataaaacctatactggctaaacaccaaataccctgagcaatcagggtatagtggcttatttgattggataaactaaagagggcaagaaccagactagatagggccaagggaattttctggaaaaataccttcattggtccaccggcctttctagctagctgcaagaatgtgacgaagctgaaccgcgctcggagatacaataggaaggaagacgccttcattccaacgacggataaagcttgactctgattctttcaaatagccacgaccaccactagcctgaagttcgaggagcaggctgttggctacgacgtcgacaatatcgatacgcaattggaaaagttcacgtggtttgtcaatgaaataatcggcatcattaagacctgcaaagagttggtcttgaatagcaagaagattttcacgtgtagcttcaaattcttcacgaagaacgctacggttactgtttagactagcttcaacctcatcaagagaacgtttggccaaaccaaaggcaagaccaaattggaaaccaaggaagtttggacgtgttttggcaatatagtccgtaccttcttttgaaaggatccaattaggatctaacttaacgtgatcgaaagtaagagaggcagtgttagcaccctgaagggaaacaaattccaaatcttcagaacggctgaggccttcagcttcagatggaatagtgataatccaaggttggctaccgtctttaaagtcagcagcaaagagagcagcgaatttatcagaacgtaggttagtcacccaaggcaaacgaccatcgagatagtagtcatcaccttcttgactgatggtaacattcaattcttcaatatctgacaagaatttgaccgcatttgacaagccagttccaccagcacgctcaccggtatacaattctttcaaccatgtttcacgaggataagcattgtcactcgcaaggatatactcgatgaaagtacggtgcccccaagaaataaaggaagctgtcaaagaatgttgtgccaattcattaagcacatcaacaacttgagtaggaccaccacctaggccatcaaactcagcaggtacgccgattttaaagacgtcgttttcagcaattttttcaagaagttggtccgcaattggtccagactcttggtcaatatggtcagcgttggtgtccaaccaagtaaggaattcttttgaaaaatgtgacataggcttaggtcctcctctagtttatctttatcagtttatctttgcattaagcgaattcttgaagttcagggttaattggtgtttgtgcgagattgttagcgtagttacacaagcttgcaaggctgacacccaagataacgtcaagggcattttgtgcagtgtagccagcttccaagaagtcattgtaggcttcgtcaccaacagcacctttagtattaatcacggcaatagtgaatttagcaagggtatcaagttttggatcgtcttcgattggtgtacggttacgaagggcttctaaaagttgaggtgtcatttggatttgcttgattgaaaaggctgtgtgacctgccacacagaaagcacatccgttagtaacagcagctgtaatttgaacaacctcacgttcagttggtgtcaatgaattgcgacggttgatttcaccgacagtacggtaagtttcaagcgcagttggcgcattagcaaggagaccaatcaagtttggaatgtatcccccattggcatctttgactgtttgaaggacgtctttgacttcttctggtgcagtttcgattgtatgaatggtaatatctggcatgattattctcctttatatagaaacgacatctagccaagttgctgagtcgtttaattttttgtcatggacctatgatagcactgtatgacttttctgaaaaatctatattatttatggccagccataaatttgatttatatgtgctataatggagggtagtaaaaggctttagaagatatgtttaagccctataagagtaaagaaagttgaattatgttaaataaaaacgatattgtagaagttgaaattgtcgatttgacacatgaaggagcaggcgttgccaaggtggatggctttgtctttttcgtggataatgccctaccaggtgaagtcatcaagatgcgcgtgcttaagctcaagaaaaatatcggctttggtaaggttgaagagtatgtgaccctttcaccaaaccgtaatcaggacattgatgcgacctatctccgatcagggattgctgattttgggcatatgacctacgaggagcagctcaagttcaagcgtaaacaagttgtggacaacctttataagacagcaggtatctcagacgtagaggtcgctgaaacattggggatggagacgccttacgcctaccgtaacaaggcgcaggtacccgttcgccgtgttaaaggtcagcttgaaacaggtttctaccgcaagaattctcacgacttgattccaattgaagatttcctcattcaagacaaggaaattgataaactcattgtctttgtccgtgaccttctccgtcgctatgacctcaaaccttatgacgagaaggagcagacaggtttgattcgtcacttggtggttcgtcgtggccattattcaggtcagatgatgttggtctttgtaacgaccagaccaaaaattttccgtattgaccaagtcattgctaagattacggaagccttcccaagtgttgtttctatcatccaaaacatcaacgataagaacactaacgccatctttggcaaagaattccgcaccctttatggtcaagacaccattacagacagtatgttgggcaatgactatgagatttctgcccagtctttctatcaggttaacaccgagatggctgaaaaactctatcaaacagccattgacttctcagacctaaacagcgacagcattgttattgatgcctattcaggtatcgggacaataggtttgtcattcgccaaacaggtcaaggaagtctacggcgttgaagtcatcgaaacagctgtcgaagatgccaagaaaaatgcagaacgcaacggcattactaacgcccattatgtggctgactcagccgaaaatgctatggccaagtggagcaaggatggtatcaaaccagatgttatcattgtggacccaccacgcaagggcttgacagaaagcttcattaaagccagtgttgccatgcaacctgaaaagattacctacgtctcatgtaacccagcaaccatggcgcgtgatatcaaactttatcaagagttgggctatgaattgaaaaaagtacaaccggtggatctttttccacagacgcaccatgttgaggcggtatcactgcttgtacgagctgagacctcagcgaagtagaagtagatgttccgcccatgcgataggactcgtagaatgaggaggggcaccgacgagatgatacgctaagtccgaaccgctgagtgtgtgagtttattggtaaaacgcaactaaacgtctcgcttttagatttcaaggcgagacgcttcaaagctccactggagctttgaactcccacaaacgcatcatgttgaggcagtgtgaaagtagttaatttacagtgaatgataaagctattgaggctagtgctgaagaacttgttgatgttcccataattccactaaatgaccatttctgtcttgtctcggataaatctgggaacattatagaggaaattgactaattttcattatgtaaatctagatctaggatactaaagtgaagacgaactggatggaagccaaattttaagtttgacgaaaatggactattgaaattttagcaattaagggagatagaaaaaatggcttcaagtaaagaatatttaaatttcattttagaacaactatccgatttggaagaaataacatatagattaatgatgggcgaatatattgtttattatcgcggaaaaattgtgggtggaatttatgatgatagatttttagtgaagcctgttaaatctgcaatagcatatatgccaaatgcaaagtatgagttaccatatgatggagcaaaggaaatgctgttggtagatgatgttgacaacaaagattttttgactggcttattcaattcaatgtatgatgaattacctgcacccaaaccaaagaaaaagaaataattaaatttgaagttgtggggaagtgaagatggattttaataagatgattccggaattatcggtttttgatattaataaaacaaaaaaattctatagcagattaggattcaaaatagaatacgaacgcaatgatgaaaagtttgttttcatgtcttttcaaggtagtcagtttatgtttgaacaaattcatgatgatgggtggaacacaggcgaattaagttatcccttgggaagaggtataaatttttcaatagcagtcgaagatgttgaaggaatttataaattagtgaaaactctaaattttgaaatatatagagaactaacaagaaatcaatatcaagttaatggtgcagaagaaacacaaattgagttcttaatacaagatcccaatggatatttattaagatttacaaattgataaatgccaatttgttgaatttagcaaggtacaagtttttatgagatgaaacctataaaacttgtacagatattgtagggtaggaaaagaagtcttcctctatactaaaataaaccgaaagaaaggagggattgaaatgaatattatcaagtcatttaacaatacgattgattatcttgaaacagttcttgatgatgagattgacgaaaagaaagtaactcagttatccggatattcgtattcaatgttcagtcgcttgttttctattctgactgaaacaacgctttcagaatatttaagaagcagaagattgacggaagcagccgttatattaagaaatacggatgaaaaaattattgatgttgctttcaaatttggatatgagtcatcagattcatttggaacagcttttaaaaattttcatggatttactccttctgaggtaagaaatggaaaaccattcaaattagtatcacgagtgcagttagcactaagtgtaagaggaggaagaaacatgaacattacaattcaaaagaaacaagcatttacagttgcaggggtaaatgaacaaagcatcaattcatcattatgtccgagtgtatggaataagctatataaaaaatatagccacgatgaacttgcaagtttgggaagcaatcaaagtatgggcgtttgccatgatgtggaaaatccaagcacaataaattatatggctggttatatcgttaatgatgtagataaagccacaagtatgggcttagatgttttggaagtggaagaagcggagtatgcagttgtagaattagtaggaagtgttccggagtgcattcataacgggtggaaatatgcaatggaagtattcttccctgagcatggctatattcattcagaaaaacctgactttgaatattactatgaaggtgatatgcacagcaaagactacaaaatggaactttggattccgataactaaagcttaaaaaccagcttgtcgagctggaaaattccagtttgccgaggtaataccttttaacgataacctcaagctatcgttaaatagtttagtggatatgtttccgcatacaactcaactacttgacatacttggtgttcactcgttttaggttgatggagtatcgctgcttgtgtgagctgagccatcagcgaagtagaagcagatgtacgtcctatgtaaggtacacccaagaaaacgagcaaggcgaagtttgattagctatgtgctactgcagactgagaacgtagttctgttgactaaagcatacaagtaaaagtgtaaaaaatcttaaaatataaataaattgaatccagagaccaactaatgaagaaattttagtactgcacttgactatgaacttgttgtatgagctgagccatcagcgaagtagaagcagatgtacgtcctatgtaaggcacacccaagaaaacgagcaaggcgaagtttgattagctatgtgctactgcagactgagaacgtagttctgttgactaaagcacacaagtaaaagtgtaaaaaaacttaaaatataaataaattgaatccagagaccaactaatgaagaaattttagtactgcacttaaccatgaacttgtcacaaattcttctaaagagtttatggaattatataatggaatttatttttaaacaaagacaaattagaagttctggagggttgatttatgggtgatgttattcttgaacaattagcatcagatgataaggagcaatttatattagataatcaggaagcatttaattatggtgcaatggtggagtttggtcatagagataaccacttcgaagaagatggacaaattatttcaagaaaaacaattgaacagtctattgccgacggaaaggcttatcgtatcatatacaataataaaaaagtcggtggaattgtaataaatgttaatggtgaaaaaggagaactggatttgctgtttgtatctccaaatgttcacagtaagggaattggttatgctgcatggtgtgagattgaaaaaatgtatcctcaagtaaaactttgggggacggtaactccatattttgaacaacgcaatattcatttttatgtaaacagatgtggctttcacattgtagagttctttaataagcatcatcccgatcctaacgaaacagatagtatggatgaagaaattgattcacaatttcgagatgggatgtttagatttgagaagagaatagattagcatttttgattttgctgagataaaataactttcagttttgtctagaatgacaattcccagtttgtcgaggtaatacctttaaatgataaccttatgcaatcgttaaaagctctatagacatgtttctacatacagataggttcactcgtttcatgttgagacggtatcactgcttgtaaaatctgaaaaataaatttgcatagcgtcgtaaaggttaaatggagggttatcgatggttatattggaattgtatcaaggtgattatcaaaaggatttagtcgcgtttgattctttagaagagggaagagcttttgtatctcaaattcctggatatactctagaaacagaagatgggtttgaagtggagtatgtgaatcctaaacacttgccggattatatggaaattgtctttaacggaaatattgtccctctatctagattttcgtttaattctgaggaaaatgtggatattatatggaaagaaatttcgaatctatccgataaaaatgataaagtgatcgaaggatattcaaaaatcgacgcgtatgtcgttaacaacgatgaagtgaaagcctatatcgaagccagagaagcgaactatggcaaggcaaaagacttcttagaacgaagtggatatgaagtcgatagaagctttttcggaagtgaagacggcgaagcgattctctacagagaatgtgacgccgaagattggcacttcttgtgtcacttagacccgctgtttgtagagattgaagatgtagaaggatatgtgaaagaagagattcaatcgttaaactaaataacgttgcaaaggcgtggcgtgagttatatttaaacagacttctattttgctggatgatggaattaaggagaaatttataaccttaaaacaaattaaatttaatcctttcaaacattgaggcatcatcagcaacttgtataagcagtcctttccaaaagaggagcgaattcctttggactcggagatgtattgattcttccgataaatcagtaaaacgtaccttaccaaaattgtactgaacgaaaatgttatctaatttagtaaagaacaaaagttttggtctataatatagatattttctagcaccacatgtggagacggtatcgttgtttgtacgagcctagaaaatatgtaggaggaaaagccttggtttcaaggcttttttactggtttcaaaaatataattttttaattgacactttgtcagtaaagtagtataaattataattaggagggataaaatgcgagatgtaaaagatccggaaattcgacgggcagagattatggatgctgctatgctcctctttatggagaaaggatatacgaacacaacaactcaggatatagttgataaagtaaatatatcacgaggtttgttatattatcattttaagaataaagaagatattctatattgtcttgtcgaacgctattcagagaaattactgagagatattcatgtgattgtctatgatgaggataaaactgctattgaaaaagtaagagcttttatagatgccacaataatctctacagataatgtttcagcagagggaactgagttacaaaagacggttgatcttgaagaaaatcgttatatgttagataagttatcccataagctcattgaaaaactgaccatatattttgagaggataatcaatcaaggcatagcagaaaaagaattttctgtaaaatatccatcagaaacagcagaatttctgatgacagcctatgtttttgtttctaataacataggtataaaaaattcaaagaaagaacctgtcaaagattacttgaatgcatttaagataatgctagaacaaaacctaaatacagaagaactttttagtaattaaaaagagatagaatgtctgtaatgagaacaatgtaccgatagctaaatcaaaactacctatcggtattatttcaaaatataactgacaaattgtcaatcgaggtgaaaatatgttagatataaagaattttagtaaaagttatggggaaaagaaggttgtggatagcctatctatttcagtacaacctggagatatttacggttttattggggcaaatggtgcggggaaaacgacaacgataaaggcagttgtcggtatccatgattttgaagatggaagtataactatcaacggtcattctattaaagaagagcctgttatttgtaaaaaagtgatggcgtatattccagacaatccagatttgtatgaacatatgacgggacttcaatatattaattttatagctgacctgtttgaaattcctacaaaaatacgcagggagagaatccaaaaatacggtgatttatttgatatgactgatcatctttcggggattatttcttcattttcacatggtatgaagcaacgaacagccattatttctgcacttgtacattctcccaaactgttgattttagatgaaccttttgttgggctagatcccaaagcaactttcctactaaagaaaattatgcatgagtgtgtttcagatggaggtgctattttcttttcaacccatgtattggatgttgcggaaaaattatgtaataagattgccattatcaaaaatggaaagttaattgcaagtggcaatacaggagacgtcaaaggtgctgaatcattggaggcatttttcatggaggtgcaggacaatgagtaacatttggatactgcttaaagctcaattgattaatttctttcctatcaatgagattagagattcaggaaataaaaaacaaagttcaatggctattgcgtgttttggcataataactcttgccttattttgctttgtttataatatactaacagctaaaacattggtacaagtcggacagcaggacttgataccagcatatatggtctcagtatcaagtttttcaatattatttttgacagtattttattcgaatggcattttatttggcagtcgagatatggaaattctcttatccttacctgttaaaagttcggagattatcactagcaagttcatgtttatgtacttattgaattttttaataggattgatgtttatgcttccgggtggaattgtatggatcttgaacggaagtttaaacgtcctacagattatattgtattttacttcaatcatctttgttcccttaatacctatgtgtatagcagcatgcatgggaatcgttattgttgtcgcttcatctttttttaaaaggaaaaatattctctctcttattttttcatttgggatgctaggtataattggatattttgcattatcagctatgcaatcaggtgatgaaagtagtattgggattatgctggctaagcaaattactggtctgtatccaatttcaagactatttatgtcatactacaattttccaatgtactatgggatgggattttttatagttctttcaatagtcgttttttatctatttgtcaaaattgcttcgttgaagtatggactacttaatacacttgccaatacaaaatcaaggtatgctaatgacaaagtatcttatgaaagaaaatcagtatttcttgctctatatcaaaaagagcttggacgatttttaagttcttatatggcagtcttgaatgctgggcttggagtgattctcttatgtgtctttagtatatgtttcctgtttaattctgtaggtcaaataggaaattctgcaggaattgaaaatataaatgagtatctttcaaacttagctcccgtctttattgcatctatgctttcactcagttgtccagcagcttcatctatatctttagaaggtaaaaatatttggattttgaaaagttctccggttgaggtgaaaatgattttaaatgctaagatagctgtcactcttacacttcatttgattggatatatgatttctgtatctgtatttatgcttaaacttgatatgaatcctattcaagtcatgaacctaattattgttcctatatgttactccctttttataacggtaatcggaatttcattaaataaaaaatatcctaactatgattgggacagtgagatgatagttgtcaaacaaagtcttcctgttattgtgattggaattattggtatgattgcgcttattacgcccattttgcttaattggatgtttaaacttccgattatatttgttttgcaggtagtatcagtaattttactggttatttcgtttggtgtttatataaaaatgagcaagttaaattttatctagttaaaagaggaaataagatgaaaaatagactgttaaaagatattttggtgttgttgggaatgatggtcatcatagtcattatttgtagatttctccctgagaaagttcctattcatttcaatgccaaaggagttgcagatatgtttgcaaataaatactatcttctactggctacagtcattccatactctgcatattggaagtttgttagggggaaggaaaataaaaagattaaatgaaaccccatctatatttacaaattgcatcaaaattaagaacgactattttaagaggtgattatgcacccgaacaacaaattccttcaataaggagattagcagaaaaagagaagtgtaatccagcaactatccaaaaagcaatgaaagttctcgaaaaacagaatttagttattagctgtggaacattaggatattttgtaaaggcaagcaataaggaaataaaggagctaagataccaagaatcgaataagtcagtgaaaatattgtgtaaaaaactagctgagttaggattttcagaagatgagattgtcaatttatctattagagaagatactcgaagaagttgaatggaaatttattaggattatttgtgaaagtatagaaaagccctggtttcagggctttttatggtaagtcatttgatatttttatctgaatcatatttcttcttcatgttacaatatatacatacaaaaaaggtaaacatagctttcaagacaagtatagtactgtctatatgagacattttagaggttatcaatatgaaatttcatgaatttggtgataaaaatttgcctcccattttattaatacacggtgggggtagttcctggtggagttaccttaggcaagctcgtatcttgtctcataaataccatgtcattctaccaacactcaatggtcacggagaggagtatcaaaaggattatatatcaacggaagattcggcacagaaaattctgaactatgtccgacagaactgcggtgggaaattatttgctgtgggtggagtctcacttggtggtcaaattgccatggagcttttgtcattagacagcgatatagctgagaagtcaatcatagacgggagcctctgtattcctcaaccaaggttatcgagattttgcatcctactggtatcattattcggtaaactgatgttcagtaaatccgcctgtaaacttcagttaagcatcatgaataaaatctatcctcaattagcttatccagacgagataaaaaattattttatagaggatttgccaaggacacctatcaaaacattagtgaccatctataaaacttatatggggaattataagttgaaaaataggatttccaaaagtaaagcacaggccctctatatttatggcgaaaaagaattgaactgtgttaaggaatcagctagattttttcagaaattgcatcccaacacgatcctgtacgaagcaaagggctataatcatagctatttatcagcctacttacctcaagagtggattgatttggttgttccatttttggagaataatgattgagtatactttattaatttagaaagcaggggttcatggaagtcaaaaaatatagtccgcttaattccttaaaaaagatagcagataacctatggattgtagatggggaagaagtactgatgaatttcaaactcttcaaagtgcctttttcaactagaatgacagttatccgtctgcagaatggtggtctttgggtgcattcaccgattaagcctagtgataatttactttttgaaatcaagcaattaggtgaggtaaaacaccttatcgcaccaaatgtcttacattatagttatataaatgagtggcatgaactatttccggaagcagaagtatggctagctcgtggtgttcaaaagcgtgccagaaaatcgggaatgaatttagattatggtcatgaactagagaaggccaattggaacgaagaaattctttttacgacatttgagggaagtttttatgtgaaagaggttatttttttccatactgaaagttcaactttgattttaacggatcttattgaaaatatagaagctgagaatttatcgctttttgaaaagctactttttaaaataggtgataattactatccaaatggtaaaacaccaagagatttaagaatgagtttcttatttggtaaaaaacaagctttgaggagctatcacaaaataaagaaatgggaacctaagaatattattatttctcatggaccgtgtattgttggtcaagcaaaagagatgttaaagcaggcattcttttggctagagaaatagggttatattgttaagaaaccttctcgaaagacaaataccaagatttcaaatttcgtatttaaaagttgcattcattcgccgcacgcaaaataacaccccacaagctacaacttgtggggcattttcttttattggttcttcacctacaaaataacatctattttttcaactttgtagagggctattcccatgattagggtcaagacgagaagaattaaaatagcaggggtccaagagttaaagagttgtttgcttgaaccaaacaaaactggtccaagggccgcaaagatatagcctccggtttgggctaaacctgatagttgggctgttttttcatgggtgctagccttcattgaaaaggcaaccatcatgtaagggaataggacactagcagaacttccgattaagaggttaaggaccaaccaatacacaaagctgtctgtattgactaggagcatggcaactccgacgaatcctgctaggacggtaatcactagcatcaaatggcggttacgatcagcaagtttagtgattaggctaggaacgatcatagagaatggaatacttgtcagtgtgaaaacggaagctagaattccggcattggcttcgccgacaccagcttgagtggccatggttggaagccaagtgatagtggtatagaagaagagtgactgtaatccaccgaaaatcatgatggcccagactttgccactcttataccaactgcctgaattttcgctggtagaagtttcttgttctaagtaatgattgtgacggacattaggaagccaaactacaagagctaaggcacagaccgcggtcaatacccagaccaaaccttgccatgaggttgccttagtgattggaacggcaactgatgaagctacggctgtggataatcccatggctgtaatgtagagtgtggttaagaatcctaactgatttggctcgttagcctgaattaggcttgggagaaggacgttgataaaggcaatcccagctccgactaaaagcgttcccacataaagaagagggagattgacggtacgcagagccgaaccaagagtcatcacaattaaaacaccgaggaagagtctttcgataccaaagcgtttggcccagctagctgcaaaaggcgagaataccgcaaaggttaagagaggcagacttgtcaagagaccgagtgaactgacctcaacacctagacctgaagcaatgtctgataagacagtagacaaggttgtgaacggggcccgcaaaacgatccctagaagaaggattccagggattagaaaatgtgaatgtttctgtttcataaactatctccatgtttaataagggtattttaatttttaagaatatgacactaatgcgtcacttccatcttaccataaatgaagggggtgatgaaagcgattacgttggattgtcaagaaagaatttttagttttataatcctattctgctgattatcaaatagcataatctgatttttaaaagaccgaacatgtagtccagcctcttttcaatgtcttcttaaatttcataccccataaggagtccgccttcttcagcataaaaactacagagtccagaagtaggaaggacttcgatgcttgcttgggcaaatttttcacgaaccaattcagagaattgctcgataaatttttcattgttgcggtgggcaatcgtaatgtggcctccagcataaccagacttgaggagttcatcaaaggcagctttgatggctttcttttgaccacgagctttttgaagcaactctagggtaccagtcttactagcttcaccgaccatacggatattgaggagtccaacaacggtgccaaccagtttgcttagacgaccatttttcaccaaattatcaactttagctaaaacaaagagcaacttagttttggcttggtaagctgtgatggcatcaaggacttggtcaaaatcaaggccttctgcgactaagtgattgagcttacgaacgagcaggtcgacctcgccaccagctgacaggctatcaatgacgtgaatcttggtatcaggatgctcttccagataaattttcttagcaatttcagcactattgtagctgccagaaagggtaccggtgattgtcacgacgacgatattgtccgccccttcaaaggacttcatatagtcatcaggacttggacatgcagatttggaagcagttgtagttgcatacatctcctccatcatttgatcaatattgagttgggcatcatccctgtaaatggtttcgcccacttggatagtcaaaggaacactgacaaactccgtatctggtgccagattgtctaaagaacggtagtcacagcctgaatccgcaataattttccatttcataggtttatacctcatatctgcataatgtacattgacaagtgttttgtcttcttttacaattttatcatgaagtgcattgctatcaaagcagatctcatcagatgtgacagatagaaagtgaatgttatggcagaaagaaaaatctcagagaaatctttggaaaatctcaaacgatttaaccaagaaaacaaagcaattacacgagaatccattgaaatttctctcctgcaattgttggagaaaaaagactttaaaaagattaccatatcggaactggttgagcgtgcgggtgtatctcgtgctgccttttatcgcaattatggttctaaggaagagattttgaaatctatttttgagtctagcattgcaaagattactaagtccttggacggctataatctcaagacggatctttaccaggtctgggtttatctccttaaggaagtcaaaaaagaagctaaaatcatcagtcttgccattgattataattttgagcaggtattgaccaaggcagtttatgattttttggaaaaacgaaatggtagctcatcaaatggtgccggtagctaccttaattccttttggagctcagctattgtttcagtgatttccaaatgggtcaaggatggcatgaagaccccagcggaaaagattgccaaacttggtcttccgctttttccacaaaagaagaagtagtaaccactgagaggtggtttttaagtaaactgcacctctccattactagttcaaatgaatagatagaactgtgcacagatgatacaaaggacaagaacgatgattgaagaacgaattcttgcggctaagcagtatgttacaaccttatttgctgatcgagcggatggccatgatgtggcgcatacccttcgcgtctataccaatgctatgagaattgcacaagcagaaggtctatgtgatctggagatagtgggcttgtcagctcttcttcacgatgctgatgatgataaattgtttcaaacagagaataatgcgaatgctcgcatctttctagaagagattggtactcctaaaaaacaaatcaagcagatttgtcgggttatcaatgctgtttctttcagcaaaaatcgtgggaaacatccagaaacgttagaaggcaaaattgtccaggatgcagaccgtctggatgcgataggagctgtaggaattgcacgaacattttcctatggtggccacaaagggaggtccctcactgataccgtccaacatttccatgacaagttgctcctcttaaaagatgaaatgaacaccgatactgccaaacaaatggcagaaagtcgccatcaatttttaatcacctttctaaaagaactagagaaggaattggactgagtaaaatattgaaatgaactttcataaaagactcatttgaaaggaagatatgctaaatcgactaataaggaaacccattttaagttgttcaattatatttgttatctgctctctagctaggctcttcgaatacttctatacgaggacagatgaaactttcttatctgagaactttttacacaagctttttggaatacttttattgtggggaattctttcaatttgcaaattaagatggaaagatattggttttacttctgacggcatcgtgagtggtgtagggaaggggctactttttggcttagtgtgttccatctttgcatatgccattgaaagttttaccctcttgtttcttcatggcaatgttcacttatcgttttatgccagtggtttttccttaacaaacgaaaaaggatctcaagcaggcatcttatttatcatgttaagtgtgttatttaacctgataaatgtgtggatggaagaaggagtttttcgtggccttttcacaaaaattcttgaagggatttcttaccgcaagagtctattctttatagccttcctatttggaatatggcacttggcaatgcccttaagagattatcttcaaggagaatcgtcattcttaaatcttattgccatggggattggctatgttatcctagcaggaatgatgagtatcaaatggtctttactttacaaaatgactggttccttgtggctaggacttggagatcatcttttcaacaatcttgcttcaaatcttgtccatgtggtttctaattctgatgtggatagtttgcagattgtgagaatactgctatggcagttgttgtcgtttgctatagtgttaggggtttatcaaaaaaactaaaaagaaaaactgatagtcaatcccttgctactacaactaattggaggttcagtatgccaatttatgaattttgtgcagaaaatgtcactctcttagaaaaagcctttaaagctggtgctcaacgcgtggagttgtgtgataatctggctgttggaggcacgacgccttcttatggtgtcataaaggcagccgttgagatggccaaggattatcaggctaaagtgattgtaatgatccgtccacgagggggagactttgtctatagccagcaggaattggctatcatgctagaagatatcaagtgtgcgcgtgacttgggtgttgacggatttgcactaggtgctctgacttcagaaaatcaactcgatacagaagctctaaagaccttgctagatgccagtcgaggcttagaggttaccatgcatatggcctttgatcagattcctaaggcagaccagtctagtgctatccagtggcttaaggaccacggtgtgacgcgtctgctcacccgtgctggaactcccgagactgatttagaatcacgcttgaaacgttatgcagaattggttgggctagcagaagaacggttggagattttagccggtggtggtatctccctagctaatcgtgatcaatttcttgccatacctggtcttgagcaagttcatggaacacgtgtcgtcttttagatttcaatggaaccagcttcttggcttggttccttttaatttttgtaccatgaaaagtcactttgcctttctagccattctttgataagctattactataacatttaaaaaattgggggatgtatgttagataatttgttaaaaaagaaccctgtcttgggtgtcattatttatccgttattagggttaggagctatttggcttggtcactattactcacagagcctttcactattggaaaaaacgggtggtcagcttaaggttaatacttttgtttacattgcctatcaattaggtgggatcaaactcgtcatgggtttctttattcttttagcgcttttctttttctatctgggctatacttactttaaaaaacttggcaatactcagaaataaggaccaagtttatataccaactgcggctgcttgcttgcagttttttcttttctaacgggtcaaccagaatccccaatttatgctaaaataaaagtattacgcttcaaaaaggagatgagatgaaagcagaagaatggttaacctattttgtaaagatttatggacgtcgcccaaagatgacagaggttgacgaggcgatacaaaatggcagtctcttggccaatcgagcagaagtagagggcttattgttagcatctaagaagagcttctggcaaaccttaagtcagtctattgtgactcataaggtcgcagcgtcagttcttgcagtttcttgtatgacgcttcttggtggtggtgccatttttgcttggcattctcatcattcgcaagctcaacagacgtcatcccttgcggtagcttcgtcaggcagtcaaactggtcaaacgtcttcctcagacaagtctaaacaatcgagttccaaagcgtctgactcgtcatcaagttctagttctcaaagtcagagtgcctcatcggaagcaaaaacgcctgctatggatgtggaagccattagaaatggtgatttttcaagcatcgaaggtgattgggtttctgatggtggtcatgttgtgaccattaccaagtcagggctcactaagtctgaagagacaggaagtactgatggcaagactgtagttaaagatttcaacggtcagcctatgttttattttgcggacaatggtccaggacacggggtcaatccttttgtgcctgtgccagccaaccaagaggcaccatctccagacaattctgtcaaagacacagatcgtctggttcaaattccagagtctgctgggccagggatcgtttacacgtcctattacagagtgaaaagtaagagccagtctggtcaatccagccagacaaatacgacagccctttggaatagtgacaaggcagccaagcttgctagttacatggtagagtttggccacaagatgaatcaagaaagctatagaaagctaacacctaacggaagtgatgatttctttggtgccatgtcttttgccaaaaataatcgcatcattgtaggtgaaaagacagaacaaaatgccccaatgaccaaccaacaaaaggtagacgttgccttttccgaagatggtacagggacagtggactatctcatcgtggacagctacgggtattcaggttctgccatgattctctaccatttcaccatccataggggtcaaccagtggtcctagtttccatgcaaaatcagggaaatcctgaaaacatgtattacatgtaccctaccaataataaggacatccaagaagcctttgccaatattgtgaatgacaagtaaaggtttgggagactagaaagcctttatcctcaatctaaagccttggcaacaaggcttttccttgtggataagtatcttgagaatgagtagtcagcaaaatctggtataatgaagccaaggaggcgcctatgaaacatttgaaaaaacagacgctaattcttttatctatcgctagcctattactcgttggtctagcagtttttgcacatatccacaaaaaggaggagcaaccaagctattccaaccttaatagcaaggccagtcttaatgaggtgagctccattctctcgaaacatttggacaaggggagtgtggataactttatcaatctggttagggattacaatgataccgtggggtctgttggactttctggggattttgcaccatttactaaaactgactatgatgtggaaaaaatcagtagcctgtggacagccaagcatggtgactttatcggtaccaactgtcgtattaacacctatacgctactgaaaggcaaaatcaagattccacaagtcaagagtgatagtgagctccttttccaagataaggatgcgattgacaagggcaagctctttgatgccaaggatcaggaaaattttgagattcttttttcaagggtcaagactgaagctacccaagatgtcaaggttcacgccaagcatatggaggattactataagcaattcacctttgatgacaaggcacgcatgctgtcggtcgttgttcatgataatctggatggagattctctttttatcggtcacgttggcgtcctggtacctacgacagatggatacttatttgtcgaaaaattgaccttcgaagagccctaccaagccataaaatttgctagtaagaaagattgctacaagtatctcacaaccaagtacaaggactataccggaccaggtctagccaaaccctttatcatggacaatggcaaatgggtggatatggactagcttaaggtgagaagaaggttttaaataggcaagaaaaaggaagcaagatatgaaaagaaaacaagccttgttgctttatctagtggggacccttggacagatcttactggtcagtctccttgtttggctgctaagagcaggaggagttagggttgattatggaactccaattggcctctttacccttatcttaggtggcttgtcatcagccatttggggaggctatgttagcatccgctatcatcactccagtgttaaacagcttgtcagagattttttccaagtcaaacagcctctcagtaactatcttttagtcctcatttttataggtttggattttttaccactggtcttgagtggagggttgattattcaggcttggtatctccccattatcttattttgcaaagcccttgtctttggtggtatcgaagaaatcggttggcgctattttttccagcctgctttgcaagaaaagttgacctatctagtgtccacgctctttacatttttggcttggtcactatggcatatcctctatttttacattgatgggtctctggccacgattcatttattgcctttcttgctaggcttattaagcaattgtttcatcttatccgccatttatacaaacaccagaagtctttggctttgtgtgatgacacatgcgcttatcaatgctttatcgcaactgtcatcagcggagagcctttggttgtcccttgtgattaaggtgttgataattcttcttgccatgaaaattgcaagtagcagtatggagaaagtgaaatcctaagctggcttgattttcattgcttcagttagttataattcccaagagtagttcaatgactgctctttttttccactcaaatgaccttgcccatctttttgaggcatgttatactagaagagtattgtcaaaattttctgacattacaggtggaaaggaggtgctaatgccttttaaaaaaacaaaacaccttgttttttcccgctacctaagcctgctctgtttgcttctagttttactagtagcgtcagtttttatagcagtgtctttaggggcggtcactatagatataggtgatacctatggtgtcatcttcagtaaattggggcttccgatggccagtcataacatagccaaaccacttgaagctattatctggaatatgcgagttcctagggttctcctggggttaatagttggtgcaggtctttccatgtctgggagtgtcatgcagtcaaccgttaataatccgattgccgaaccctatatcctgggaatctcggcaggggcaacttttggagcaaccttggccatcattttaggtcttaaagctgtagtaggcttgggtgcctttgtgggagctatcctagcgacggttcttgtcctaatcattgcctctatgcaggggagagtgaccacatctggcctgattctatctggaacggttgttaatgccctcttcattgcctttgccaattttataatctctattggagcgacagcagacagtgtcatgaccattaagttttggaccatgggttcattgacaggaacatcttggtcagatttgctgcttccagcagtagtggttggtttggcctttctctttttctcaactcagtatcgtgtcttcaatgccatgatgatgggagatgaggcagctttgactttagggattccacttaaactctattggtatctttacatcgccattgttgcggtcataacggctgtcttggttgctagctgtgggattatcggttttgtcggcttgattacccctcatattgctagaagtttagtcgggactaactatcgtaagctttttcctgtggcaacgctcttaggttccttgtttgtggtttgggcagacgtcttggctagaatcctcgttaaaaatgcagagctaccgatcggtatctttactgccttagttggcgcacctttctttatttatattgtgactagaaatcgtaggaaggtggtttagacttatggatttaaagtgtcaggatattcattattcgattggagagaaaaagatcctaaacggtgtctctctagaggttaaaggtgggcaattccagaccatactgggaccaaatgggagtgggaaatcaaccttgcttaaaaccatttaccgccagttgaaaccagatagcggtcagatttttcttgatggaaaatccctagatcaggtaagcctaaaggacactgcaaaagaaatggccgttgtgacacagtttaatacccttcaatttgattgtacggtggaagaaattgtcatgcttggccgaacgccccatctttcctttctgcaaaaagaatcggagcgggatcacgtcctcgttcaggatgccttagacaaggttggcatgtctgaaaagaaggcacgctattattcgtccttatcaggtggcgaaaaacaaagagtcatcctagcgcgtgccttggctcaggaacccaaactccttttgttggatgagcctaccaatcatttggacattaagtatcagttggagatgttggccttggtcaaggagctaggcattaatgttctcgcagttctccacgatattcaattggcctgtcgtttttcagattatatctacttaatgaaagggggtgagattgttgcccaaggtgtcccaagggatgccgtaaccccacaatccttgcaggcggtttatgatgttcagagtcgtattacttggacggatgaccagcaggcaatgattcagtatttataagcctaggaaaggaaggccttatgaacaagaaaacatttcgtatcgcattaatcgctgcagcagtactcacattgacagcatgcagttctacatataaaaacagcacatcatcgtcatcatcagcaaaagaaacggtgaaaaagactaactcagaaacccagtatcctttgaccgtcaaaacatatgacgatcaaggaactgagctagatcaagtcttcaaaaaggcaccagaaaaggttatcacaaacaacctttcatcaacggaaattttgattgagcttggtttaaaagacaagattgtcgggatgcttaaccctgacaatgaagtaaccgataaatataaggaagacattgcctcaatcccacatatcggtgataagaagaccatctctcaagaagctatcttggcttacggacctgatgcccttattggtcgtaacatgatgttctcagacaaatcaatgggaaccatcagcacgtggaacagcaacgacattcccgtctatacgcaaaaagcttctgtttcaacaatcaaacaagatttgaataatatcatcgaagatgttaaaaatattggtgacattttcaacgttcaagacaaggcagacaagtatgcaggacaactccaaaagcgtatcgacaccgttaaaaagaaaaacaagtcttctgacaaagacttaaagaaggctctgatcatgtgtgcctacaacgatgagacctttggaacttacaaatctgcccttcaagaaagtatgcttaatcagcttggctataccaatgttgcgacaggaacatcagatttgactctggaaaatctcgtgtctatggaaccagaattgattatctatgtaactagtgaccgtaataaggccatggacaaggatgctacagacaagatggaaaagaacgctgttcttgaaaatgtaccagccgttaaaaacaagaaaatcatgactatttcttatgatgagcttatggattacggtccatctgtgattgattctcttgagaaggttaatgactttgttaataaataaagactttgtctgccatggcattcgagtgacgattgcccttcctgagtcttatgatgctactaagacttatccagctgtttttctgaacgatggacaactggattatctgggaaaactagcggattccgttatcctggtaggccttgagcccaagaatcgcttggatgattttacaccttggtatgctcaggctttgagacctggaagtcctgattttggtggcaagttagccagctatcatgaccatctatttggccatattttaaatagcatccaagaggagtttcgattggatgacagttgtatggcttacggaggctactcgctaggtggactggctgctatccacagtctttatagcagtgataagatgccttttatcttttccatttgtggatccttctggtatccagattttgtagattactgccaatcccatcagcttcttaataagtcttgctcggtctatttacgtaacggtttgaccgaaggggctaatcataagaatagactggccaaggctcctagctttgccaaagaagtacatgaatgcatcaaaaaacagtgcttgtccacttattcagcatttgacccctacggtcatcatgataatctccaagaaagatatgatgctttttcggactggttgattgaagagtggaaactctgaaatgctgctattggtgattgagtaggaaagagagaagaaaagtagtgaagaaaattccgacgatggaatctcttcactactttttgttatgctcgaaaactaccatcacagttgatgcttccgaaaagtttttagacatgaatcaaaaaacgtcttaactccgtatattcaaagtaatttacttacctttgacttatatcctaacttcaaaaaggacaagactattattgttgctgatgcagtaacttatatcatttaaaacttttttgttggagaagtagaagggaaaaaactatactttggtgcctgtgaacacttcgatatggttccctagtatttttatatctactggcagattatccgatttgtctccatcaacatctgactctaactcaacctctgaagaaatcctaatattacgcgctttgatatattcgatattatcgttacctactagatccccttttaacaaatctgggatagtcgataatttagaaatgatggatgcatcttttaaaatcaagatatttccatatccatctgtattttcatcaaatagttttttgtctgcatagtaattagatagaagaactaagacctgactagcttcaccttcataattgccattttcgctttcaatacgaacattaaatacatcgtcttctacaacggacttcatcgtattgattgcatatgcaaagataccgtactttgttttatcttcaatatcaacgttatgaatagcttctggtaaagatccaacactaaaaatatagccaaaataattttgattagcttttccaacatcaatggttttagtaaaattgaagtcaagttcttcaatcgcttgatcaatactttggttgatttctaatagcttagtgattaaattaccagttccaccaggaataatcccaagttttgggatgtgatttttttcagcaatccctgaaataacctcatttacagtaccgtctccaccaaaaacaattactgcatcatatttttctttagaggctttttcagcaaattgagttgcatctttggctttttgcgtaatcttagtttcaacataatcaaaatactctttagccttattctccaagatctctttataatctaatgctgtttctcctccagaagttggattaataattatcattacttttttcattgctattttctcctatggactactagtgacaatacttttcaacggtttcttatgcttatcaaattaatatctcacattacttgttgttatttggggattctttttacttatccttttctatttgttgaagatcatcatcgtttttatattgaatgatgtagtcgactaattctttttcagttaatctatcatttgttaattgtgaaacctgaatcgagatatttttcaaaccatattcattttgtttgttaatgataccttgtaactcagcttctgaaagatatttacctgaaatggttagctttagtgtattattttctttactatatttctttttcaaaatagtatggttttcaaattgatcagatagataattattgatagactcattgattagcgtatctctaactaaggtagttgcagaagctaaacttggaataataagaacaagcgagactagaattaatatttttcgcattttagaggcttcacgattatgtttaacataaggattattaaccatcatcacattagtgccaatatatgtagcaatcataataaaactgcagttaatggagaacaaatatgacgcccctatcatatactcaagatttcctgtggcaatagaataccccacggtacaaacaggtggcataagagcagttgcaatggcgacaccaggaacaatgttattagcttctttctttcgtgctccaataatgccggctaatccaccgacgaatgctattacaacgtcccaaattgtgggcgaagttctagcaataatttccgtacttgcataagaaatgggcgaaattaaaaaataaagtgtagaggctaagaggcttactgcaacttgaataaaaagaactttaaacgattttttgagaagttttgtatctaatattgctaacgcaaaacctactccaaggataggtgtcatcaatggagaaatcaacattgcccctataattgttggaatagaattcatattcaaaccaatagatgcaatcaatatcgcacacaataaagtggttaagtcactttttgataaatctaaatcctcatagattttgtccctaaattctatgagagaataaagtttaccatccttcaaaactttttccataacagtactccctctttgttagtatagtcaactttttaagctcactctttgacgacgtatctaaatcattggtcattattattgtaacttctttacgtgggcgtgttttatattctacattcaatttgtaatcaattcactactccatattaattttaaactcctactgaaagtgatgcagtgtttggtgtattatttatactattttgttagatacttactatttaaagaaaaatgtgtaagggtttacatgtctcaattatacattttatttttactttcgtcactcgaacgtcttagggctattttcttttgtggctaaaatgctaatcaatcatatgaatgtagcagtttaatcaaacttttaattcataaatcaatccatttagaggaagtcctaataatagtagaagtatgtgtagacttttaacaaaaaaatgagataagagaaattgtaaaaccatacaagcgattgcaaaatcccaggatggttttcatgtctatttttgtgtaagcgcaaacattttcattgacttatcaatttgattaacatatactgttattaacaggtatatactaacattaatcttatgattgttaagattaatataaaaaatgttttagctaaaatgtaactctttagatggtttgattttccaaacaatctaactttcctctatttagaaagggggagacattatgctttgggctattattgtcggaggctttataggttttattgctggtggaatcactaaaaagggaggttccatgggaataattgccaatatctttgcaggtttaattggttcatctgttggacagtcactcttcggttcttggggacctagactagctggaatggccttaattccatcaattttaggggcagttattgttgttgcagtagtatcatttttcttaggaaaaaaagaataattttcaatatttcgataggaagactccaatcaactagcaaacttagtgctgataaatttaaaaagtggtaaacatggactagctaatggtttatcagcaaataaagataacgttagtgagggtgttcaagctgtttatgactcgacttcaacacaaaagctataatttaacttatcttgttatacttaaaaatttgaatgtattattgaagagcgttcatatttaacaatctttatgtccaaaggaggataaaattatgtcagtagaagaaaaactcaaccaagctaaaggcgcatttaaagaaggtgtcggaaaattaactggtgataaaaaaacagaaaaagagggtgctgctgaaaaagcagtctcaaaagtgaaagaagttgccgaagatgccaaagatgctgttgaaggcgctatcgaaggtgtgaaaaatatgattaaaaaggacgataaataattaaatagccaattgatttttcacataaaagctacaaaagctactctacaaaaaaatagagttgtcatattctactcctaattactcacttataagattactttcaaaataactacaaatcgatattcttataatattattcagttgaaaaatcaactttctttagattaattcaaattcctttttaactccatatacatattctttctaatagtaaaagcactctaatttctatagttttatacaagctatagacgctagagtgttttttataacattttgaagaattatttaatgattaggggagatttgtatttatctagtgtctataaaaatcagcaaagtataagtgctgacgtcatcccgaatagggaatggcaaacgtttgcattacttgtgaatattttcactaccaaaacatcacattttcagtgaattacttgattttcataagtattagttttataatcaaagtatagaaaacgctttcaaaaacatctccgagtttttgtcctacttgaagtggttcggctaacagccgacttccattctagaaaggagtattgttttgagtcaatgtgatattctcattataggggcaggtcctggcggttatgttgctgctgaagaagctgcccgtttaggtaaaaaggtaactgtcattgagaaaaactccataggtggcacttgtttgaacgttggctgtatcccatccaaagcctatcttgaacatgctcattggctattagctgctaaagaagcctctcagtatggagtaactgttttaaatgataatcttgattttccaaaacttgttgctcgcaaagatcaagtcgtagcaacactacagtctggtattcaatcaagttttaaacaattagggatcacctatattgcaggtgaggcatcttatatttctgataaaaccttccaagttaatggtgaaagagtctcaggtaagtctgttattttggcgacggggagtcatccatttattcctcctattcctggtattaacgatgttgactatttgacaacagatagctttttcaacttaaaggaacttcctcaacgtttggttatcattggtgggggtattatttccgttgagttagcttttgctatggctccactaggtgtggatgtgacagtaatagaggttgcaccaacaattttggcaactgaagatgacgaagcacgttccattattagagaaaagatggaacaacttggaattactatactggaaggagttagcatagatagggttaaagaaaatgctgtaattctagcagatggcaagtcctactcttatgataacttacttgtagcaacaggacgtaagccaaatattgacttagcccaaatgatgggcttggagctgactgaaaaaggttttataaaggtagatagttattacgagtcatctcaatcaggtgtttatgcgattggggatttgattcctggatatatgttagctcatgttgctagtagcgagggaatcaaagctgttcgagccatttgtcgtcaggctgaggaaccggtggataattcaagtgttccacggtcgctctttacaacgccagagattgcttcttttggattgtcagaagaggaggcggttcaacaaggatatgatatatcagttggtcaacttccttatgtttataatggccgagcaattgcgtctaattcagcaaaaggttttgttaaaattgtctctgaaaaacgctatcacctactattaggtgccgttattgttggcccacatgcaactgatattttacaatccttgattgtcttgaaagatgctgaaggaacacttgatcagcttgataagacaatttttgcacatccaacaatttctgagttggttcaggaagttgcaagactgattttaaggtcctaagctcgatagataggtttagtgtagtcattttcattttttcaaatttatatatatgtcaataatatttgttttttataaagttctctcatagaaggaggaaacaatatgacacattatcaagaattgccacaagccctaatgaaagaaaaacatcagggacaaaccttaaccaaggaagaagttaaggttcaaactgcccatgatcttggtgtggaaaatgtttcaaaagaagaggctaaatccatgtataagactatgtgcgatattcgaaattttgaagaaaatacacgacatttcttttcaatcggtcaaattccaggatttgttcacctttactcaggggaggaggctattgcgactggggtatgtgctaacctgactgataaagactacattactagcacacaccgaggacatggacactgtgtggctaaaggtggagaccttaaaaaaatgatggctgaaatctttggtaagtctacagggcttggtaaaggtaagggtggttctatgcatatcgctgacttggataaaggaatccttggtgctaacggtatggtaggtggaggctttggtcttgcgactggtgctgctatgcgtaacaaatatctaaagactgatgatgttgctgtatgtttctttggtgacggtgctgccaacgaaggtaattttcatgagtgcttaaacatggcctctatttggaatctacctgtggtatttgtaaatgaaaataacctttttgcagaatcaacaccacaatggtactcatcaggttcaccaacaattgctgaacgtgcacaagcttacaatatgcctggagttcgcgttaatggtaaggacttatttgctgtttatcaagtggccaaagaggccattgaacgtgcgcgtcgtggagatggtccaacgttaattgaagctattacttatcgtaaccatggccatttcgaaggagatgagcaaaaatacaaagcaccagatggaatcgaaaaagaatgggcagatgtcgatgccttggaagtatttcgtgaccttgtaactgaaaagggtatccttagccaagatgaattggatgagattgttgcccaatcacaaaaagatgttgaagatgcaatccactttgctcaagagagcccaattccaaaagaagaagctctctacgaagacgtatttgcagactgattgaggaggattcataatgactagagaaacattatttatgaaagccatcaatgaagggctcgatcaagccatggaaagagacgagcgagttgttcttctaggagaggatatcgcaggtggtgttaatgttgaacacttagaaaataataacgaggatgcctggggcggtgtcatgggtatcacacgaggattgatgccaaaatatggtagggaacgagttattgatactccgatttctgagcacggctatttatcagcttcggtggggatggcgcttacgggactaagacctgtaccagagttgatgtttaatgattttattggattctgttttgatgccctattaggacaggcatctaagatgcgttacatgtttggaggaaaagctaaagttccgatggttgtgcgtactatgcacggtgcgggtgcttcagctgcggctcaacactccggctcatattacggtctctttggatctattccaggtattaaggtagttgttcctgctacaccatatgatgctaaaggtttactattggcgtcaattgaagatgataatgttgttattttttctgaggacaaaaccctctatggcttaaaaggggaagtgccagaagaatactatactgtaccaattggaaaggctgccgttcgtagagaaggtaaggatttaacaattgtgacaattggtaagatgttgtatgtagcttatgaggttgcagatcgtttagcaaaagacaacatttctgtagaagtgattgatcttcgtacagttgctccatgggatgaagaaacagtgttaaattccgtgaagaaaacgggtcgtttgattattgtggatgaggcaaacccgcataacaatactgcaactgatattgcatctgtagtttcagataaagcttttgattatcttgatggaccagtgaaatgtgtttgtggaccaaatactcctgttccatttgcgacaaacttagaacaagcctatatcccggatgcggataaggttttgaaagtagctgatgaattgattcaggacttgaaaggataggagggcgcttatggcaacagaaattttaatgcccaagctcggcctaaccatgactgaaggactcattcaaaagtggttggtccaagttggtgatacagtaacaagtggtcagcctttattggaaattagttctgaaaaattgactagtgaagtcgaatcccctgcttctggggttgttctagacattgtgcatggtgaaggtgctacagttaaatgtaaagaagttgttggatgggttggccaggaaggagaaaatgtaggaatccaagaagctcctgcacaagaggaagctccaactgaagtcgctaaagattcaacaccgtctagtcctaaatctactacagcacctatagctcgtactagtggggaacgaattttcattacaccggtggctcgtaagatagctactgagaaaggctatgatatctcccttattaaaggaacaggtggaaatggtcgtattacaagacgtgatgtagaatcttaccaaccaagtcttgttgctgataaggtcgttgaacctctaacacaagctatggccacaggacaatacggtgagggactcgaaggcatgcgtaagattattgccgaacgtatgatgaatagtcttcattcttctgctcaagtgacactccatcgtaaggctgatttaactgagcttttgaaattccgtaaagaacttaaggctaaggtacatactccacttgaaaatggtgaactaggtatcacaactctattaactaaagcagtaaccaaagctttgagagattttccagctttgaatgcttggtatggtggcggaattcatcagattcacgaacgcattcatattggtatggcaacagctttggatgatggtttggttgttcctgtgattcaagacgcagaccgtatgactttagcagatcttggtcaaagcattaagactttggctaatcaagctcgaaaaggtacacttgcatctgacctatatagtggttctactttctcaattacgaacctaggggggccaggtgtagaatacttcacaccaatccttaattccccagaggtggcaatccttggtgtaggagcaactcaacaagctttagcatttaatgaggagggagaggttgttcaaaaagactatcttccattgagtctgagcttcgaccatcaagtcatcgatgggcttccagctgctgaatttttagcaagagttgtttcttatcttgaagatccttatctccttattttctagtggatttaaattttgcaaagttaagattatcaactaatagacatattataggttaaaatataaagtttttgctaaccttgtttagctcaatagctagcgtaaagcttacacaaagagaagactaacttagtcttctcttttcgtgttgctaagggggagagcttttcttaagtcaagtgggaatttgtctatcaatttcctaatgtcttttaataacaatatacaaaacccatttgtcattttgcctttcttcaatctttgaaaagccaatacttgttaataactgactcaattcagaacttgttccataatctgtcatatgatactgtattttttctttttcggaagcaataatcagagtagaatgattggacatgacttgatagatttcctgaaagctttgttttaaatctttccagaaaatatgggtctgaatggcaaagacaaaatcaaaataatgattttggtagggaaggttttcgacatttccaaccatcagctggacactatcattttctattgactttaaaagcatccgtttagcagtttgataagactccttggaaatatcaatgccatgaatgtcaagatttttatctaaagcaagtaggtttttgatagtgctaccaccgccataaccgacttctaaaatacgactattgttggggatagtggtttgttttattgcccaaaggctgagttccttaaaataggacgaccagatgttggtaatcactcggccaacaagaccactcggatttctagattgctttataagatattgaatgagcatgttccctcccatttttgaaaataaagtttgaaatatagatggtttaaattcaaactttattatagagaaagctagtaagaatagcaaggaaaaatgaaatatatacccatatatttcaaacttatgctacaattggtaataacagaggtattcacatgaatcaatatcaaaagacgactgagaaaaagaagcaagcgattattcaagcagctttgcgtttgtttaaagacaaaggttttaaggaaacgagtataaaatctattgcagaggcagcagaagtatctcctgtttctatctacaattatttcgggagcaaagataacttggtaactctctgtgtcaatgacttgtttgaagaaataacccaacaagctgaggacattttaaatagcaatctagattttaaaacaaaattagaccatgcttttgccctatgtcaggagaaaatgagtcagcaaatttcggactattttcaagataaaatggtggaagattttgttttctcaactctcctaacgaaagcaatcactgcaaaaaaacgtgacatctatcgtgcttttattcatctcggaaaagcagagggccttattgctgaagacctatcgacagagcttatcttaaatgtcatggatgctcttaatggtatgggaaatcaattagcccatagtgacaatttagagacagaggttgagcaaattcatcagatctttttgtacggtattttaggaaaaaagaaatcatgattctcctaattctattattgttcacagctagcaacatcccatcccaatcagttgtatattctcatacaagggtgtaaaatctactatataaagaaaaagaggaagtagtaatggaattaaaagattttacagaacaagaacaaaagcaaatcgaaaaaggtttgagtacagctgagatttctgacaaggaagcggctaagaagttgctcgctctcgtaccgcaagaatggattaaacgtattcctttctttgtcagagggcatgcgacgaccaagacggtggagcgtgtagccaagcaataccctgaactctacgcagtagctaaacgccaaggggaccttcctgaaaaagaaggccaagagttgcgtaaaatcatgacaagcatttttgaagaaaaaatgaacaaacacaagattaagtaagatttataaagattgtgaacaatgccatctttgggttgatacagattagggtgtgatctatctgatttatcataccgttacggaggaaaaatgagcaaatttatttcaaaacaatcagtcgctatctggtatgcactgactgccctccttgctacttttatagtggggcaagttatcctttggtgtttcccagatgggactagtatgggtgcctcgctattgtttattctaatgaactgtattcccatgattgtggctgctgtcttttctcttgtgttgagtgaaatcaactccttgggagaatttttcaaaaaggtctttcttcaaaaagaaagtaacctgtcctggatgctagctttcttcatccccatcatttattatgggatctccatcctgctcatgaatgttcgctttactggaaactccctcttggccttcttactctatttcccctggaccttattatatggcggtctagaagaagtcggttggcgttggtttttacaagagcatctttcctttagtaagcactttatacctaaaatgatggttctttccattgtctggttcctctggcatatccctatttatcaactcccttggattacagcaggttcgtccaactatctcatcttttacttgatgattttagggaataccttcctatttggagctctcaaggagtactcgaaaggagctgttccttgtatcctcgctcatatgctgattgatagtctggctgtccttatgctggttcagagttcactcactcagattgtccttcttgttattttcgaaattctagtagccttttggctggtggccatgagaaaatcatagaaatagacttcaagctctcacctgatttaggtgagagcttttctttcctatctgttgacataatgatatagtgtcatttttaggaggtgactcgtttggcttcatcatctaaagactaaaaaagaaggccaagagttgcgtgaaatcatgacagccatctttgaagaaaaaatgaacaaacacaagattaagtaatgttgtatgaaaagaggtataagtccgcaaacttacacctctttcttatctttacttcttatttgatttggataggctgatggcaaccattgtcgcacacaggaaaaatgcagctagtaacccttttgtagtagtcgtcatgaaaggtttatcaaagacataatagttatagacagcaaatcccagtccaataagagttacaataatcgacacaacaaatagcgtcacccataatcttctttgagtcatcgtcaacctcctctttgtatccgttttctttctgcctatagtataacataaaaaaccttagctaaattccatagagcggttcggctaaggtttttcattttatttcgtcaagataaccgtatcatttggatcgtggtcatcatcttcaatagtcagttgattaccatcgagtttatagtgtttggtgtcgtcaccgattgttagactttgattgtcagagttaactgtcacaggcttgctttccttctcgccatctgcctcgtcctcttcccaagttccagtatttccagagatggtaagagtaatgcgatcattttcgtcagtccctttataggtgccatctagcccttcagtttgtttagaggcttcagagctttgtgaagatgaaaccttacttgaactttgttgggtgctagcagagctttcaggtgtttgagctttctggtttgagcaggctgctaaaagaccaagaactgccatagaggcaagagaaagtgtgagttttttggacaatgtcataggcttgtctcctttctttgataccttaagtatagcaaacgcttacaaacaaaccaagcaaaaaaccttttctgaaaatacttgaaaattactctatcggattcttaaaagcataatatattatccctatttaaactatgctatactgataaaaaagcaagaaggaaggttcctaatgacaattaccaatccacgtcgccagtgcgagcgactttgggcagccaataagtatctggtgctcagccattcgaacaagatttacttggaaatccgtaactatctcaagaatgaagaggttagtttggatcaggttcaagcctacattgatcaagcacttgaccttcctgaaaatcctggtcaggtcgtcaatgccttccaacatatctgggggtattttaagaagaaagcaaccgctagcgaaaaggaaaagtttatggcccaactggatagctacgcagcaggccaaattcctcagacgtgtttagtggaatccgtcaaagagctcctcagcaagtatcctaatcgctatctggaagagtcaaccttaattaatgggggttcaaaatgagactgtggcatcaagacttgattgcaaaactaccccgtcagcaattattaggacaacaccgagaatgttgtgcccttcgtggcaagggatggcaacgcaagcatgctacggttaactatgtttttgactattctccataccgcctgtttaaataccatgagcttattatgcaagaaatgacgaaacgtggctatcgtgtcagccctgagtggttagacaaggagtatcgaggcaagcagatgccagcctacgacaagcttgaagcggagacattaccagccatcatttatcctgagcatgataccgcctatttacaggaatgtctggacaatctcaagcaaaaaggaatcttcatctaaaggaggaaaacgatgcatttatttaagtggctagcacctaaaaagaaagtagaagaaggccttgtcatgcgtatatcgacagcggatcaggtggactatgcgacgattacagccccaagtgacagtgatatctgggatgccttggtgcaactcccagcatcctacgatagtctctatcttacctatggcgataaaaagtcaacgagctttatcttcgttgagtacgaggatgaccagtatcgtttggaacacgacacacctgagctagggttagaattgaccaatgtcgctcgggtatctcaacaagttgccagagacatccttattcgcttttcaaaagagcacacagtgattttggacgaccattggaagcaagagaaagtcaggtagtcctatggcataccttaccccagaagccagaagaaaacggtgaaaagccttgtggttaattatcgaaatcctttgtctggttcatttcgctatcattgtccctcgtgaccgagtctttacgcctgaaaaatgggctcatacaccagctcccatgcgacacaaacttatgtggagttttcaccgtcagtatcagcttgagggcatgacgagagaagaagtggagaagctcttgggcaagggtgacgaccttcaaggaagtgttgagtaccagctggccgacgattggattggtggctggcgagtttaccatattgactatgagcaaggccgtgtgattcgtgccaaagaaacctggcaagattggtgagaatgagttttctcttcctctaaaagtagtataatgaaaatgtagaggtatacgctttcaaaaggtaaaaactgtcttttgactagaagaggaggataaactcatgaccctatttatatctaaactgatgaacggtattatggaactgctcatagtctctgtcattcctttcatcacttggttaatttggagcaggaaaaaggtcggtttctttgactggattgggttgaagaaggttgagagtcagaagaagaggcatttactactgaccattttggggattagtctactttttcttcttttttcaattgttgtatttagttggttcgactctagccaaacggccacagcaactttttatggaaagggaatgggagcccttccagccatcttggcctacgctattttagggactgccttgccagaagaaatcttctttagaggttttctattaaaaaggctacaaggaaaactaggattcctaggggccaatctgcttcagtctctcttatttggcctcatccatgcacttatgtttatccaattaactggttacctaaaagctatggctattatgacctttatcagtctcatcgcttacatttttggtgctatcaatgagaaaaaagcaggtggctctatccttccaagtgtctttatccatgccttggccaacacgattgtagggctcctctttgccttctccctcatttagataaagttatatagaagaaagttatcatggatgaattaaaagaaatcaaacttaaaaattatcagtacttaaatgaggttgctatcaagggggagacactcttcacgggctcctctctcatggagctttttcccatttgtgaaatcgctaggagtagaggtgtcgacgacatcatctacaatcgaggtatcagcggcctgaacacggatgaatttctccagcatatccaccccctacttttggatctgcaaccgagcaaggtgtttatcaatatcggtaccaatgacatgaccgaggagccttatggagaccagtggttccagcatctgactgcaaacatcaagcagattatggagcaatcacaagctgtcttgccccataccaagatttacctcatggctttctacccagccaatcttcatttgccttggcagaccaaggcttcaatccagtggatgaaactgcggacacctgaaaatcttgacctttgcaatcaggcactcgaggaaatcgcccaaacctatggttgttactttattaattgtaatgctgagctggtcaatgataggaaagagcagaaggctgagcacacctatgacggtgtccacctttatgccaatgcttacttaaaagtctttgaagctctcgaaccctacctcttgaattaagaaaatatgagagaatttccagttcttactcgcttttttcctttgattacagtacaatagacgtcaaaagtgaaaaattgaaatgaggtatccctatgtggaaatggtttaaacgactcattgtcctcgtcattgtgctctttttggcagtggcagctctacttattccggacaagatcgacagtcaggaccaattaaaaaatgtatcaacacaaacatctcttgccgatttagcccaggctggtattggtggggcctccctttcatcaggtggggtttcaaccgagattaatcttgatagtaaccagtttcgtcaaatcctaaaagcaagcatggctgattctaatgacgagaccttgctaaacagtactgtagagttgaatgattcttatctcacagctaagctaccagtgtctcttggacctatcgaatcaacattcagccttgatttcacggtcagcacaaacaaggaagtcatcctattagacttggcaggtgcccacctgggtcgcctccctgttcctaaatcactggttctaccttacctcaagaagagtattgcccagtcaagcagtggtgttcgcatggttaacaatcagattcagctcaagcttcctgaaatcggctacgaaattgagcaagccactgtaaccaacagcaagatgaaggtcaagcttaacattccgatttccttgccaaccagttggtaatgtaagagaaatctatcaatccatgataagttaaaacaagtccatagtctggacttgttttttgatgctttcacttctaaactaagaaagttaaaaaattcttgaaataatacgtttacatctcccaatcccctagaaaatggggatttcctgtgctatcataagactgtaaaaatgataagcgtctgacactcattgcaaaaagagttaagtcaaagagttttaggataatagttaggaggaaaaaatggacgctttaaaatatatcacacccaaatttttcaccactatcaaggattattccaagggacagttcatcaaggacctgattgcaggagttatcgtggcaatcattgccctgcccttgtcgattgccctagcgattgcctctggtgttaatcccgaacaaggtctttacacagcagtggttgcaggcttttttatttcctttttaggaggtagtcgggttcagattggtggacctaccgcagccttcgttgtcatcatctatggcatcatcgcccagtatggcatggcgggtctgactgttgccacgctcatggcgggactcatgcttattatcatggggctcctgcgttttggcgacctgattaaattcattcccaaaaccatcacacttggctttaccttggggattgccgttgggattgtggctggacagattaaggattttctaggccttgagatgaagtccgtgccagctgagtttctggaaaagatgattgcctatggagagcatctttcgagtattagttgggagactctagctatcggtattttagccctgctcattcaaatcttttggccacgcctttctcagaaaattccgggttctctggttgctatctttgtaaccacagccatcgtagcttttggtcatctcccagtcaaaaccattggtgacctatacaccatcaaggcgggactcccaagttttacggttcctaacctatcattttctttgattcgtcaaatgatttcgccagccttcaccattgccatattggcagccattgaatcgctcctttcttgtgtggtttcagatggcatgattggtggtaatcaccgttctaatgcagaattggtcggccaaggtgtcgggaatatcatgtcagccctctttggtgggattccggcaacgggagctattgcccgtaccgcagccaacgtcaaaaatggcggacgaacaccagtagcaggtatggttcatgccttcaccttgcttttgattttactcttcctcatgccttacgcctcattgattcccatgacctgtctggcctcaatccttatgattgtcggttataacatgagtggttggcgtacggttggtcgtatgatcaaacgtgcccctaagagtgatgtggcggtcctgctagtgacctttatcctaaccgttttctttgacctagtagttgccatcgaatttggtatggtcctagcagccttcctcttcctcaaacgcatgtctgacgtggctcaaatccgtcagtgggtagacaaggaaaatctggacgatccagttttgtctgaggatagcgacttgaagcaagtccctaaaaacactgtcgtctatgaagtttttggtgccctcttctttggtgcagccaataacttcttgaatgtgatcaatgatgaaactaagaatgttctcatcctacgcatgcgaaacgttccagccatggatatctcaggcctagatgcccttgaggaaactctggccatttgtcaaaaacgtggcatgaccttgcttctttctcacgtcaatccacaaccctaccgagtacttgaaaaatcaggctttattcaaactattggaccagaccatatctgcgagtcgaccgaccaagcccttgaaaaagcagcagccctagcacaagaagcctagacaaaagtttttaatacaagaagaaaaagccagttcaactgaacttggctttttaaaatacaaaactaggatagcgcttacaaatactattgtgaattttcagatattattgtaaaatattagaaaaaagaataaggagattcttaaatgagcgacttagttttaggacttgatattggtataggttctgttggtgtaggtatccttaataaagtgacgggagaaattgtccataagaacgcacgcatcttcccagccgctcaagcggagaataatgtagaacgtagaacaaatcgtcaaggaagacgattgacacgacgtaaaaaacatcgtagagttcgtttaaatcacatatttgaagaaagtggattaatcactgattttacgaaggtttcaatcaatctaaacccatatcaattgcgagttaagggtttgaccgatgaattgtctaatgaagaattgtttatcgctcttaaaaatatggtgaaacaccgtgggattagttatcttgatgatgcaagtgatgacggaaattcatcagtaggtgactatgcacaaattgtcaaagagaacagcaaacaattagaaacaaaaacaccaggccagattcaattggaacgctatcaaaaatatggtcaattacgtggtgattttactattgaggaggatggaaaaaaacatcgcttaattaatgtctttccaacatcagcttatcgagcagaagcactgagaatactgcaaacccaacaagaatttaatccacagattaccgatgaatttattaatagttatctccaaattctaactggaaaacgtaaatattatcacggaccaggaaatgagaagtcacggactgattatggaaggtatactactaagaaagattctgaagatgagtacataactttagacaatatttttggaatcctaattgggaaatgtacattttatccggaagagtatagagcagcaaaagcatcctatacggctcaagaattcaatttgctaaatgatttgaacaatctaaccgttccaacagaaaccaagaagttgagcgaagaacaaaagaatcaaatcattacctatgtcaaaaatgaaaaggcgatgggtccagcgaaactctttaaatatatcgctaaactacttgcttgcgatgttgcggatatcaagggatatcgtatcgacaaatcagacaaaccagaaattcatactttcgaagcctaccgaaaaatgaagacgtttgaaactattgatgttgagcaaatggagagagaaaagcttgataagttagcctatgtcttaacattaaatacggagagggaaggtatccaagaagcgatagagcatgagttttctgatggtacttttagtcaggaacaagttgacgaattggttcaattccgcaaatcaaatagttccatttttggaaaaggttggcataatttttctgtcaagttgatgatggaattaatcccagaattatatgcgacgtcagaagaacaaatgactattttgacacgactaggaaaacaaaaaagaacttcgtcttcaaataaaacaaaatatattgatgagaaacgactaactgaagaaatctacaatcctgttgttgctaagtctgttcgccaagctataaaaatcgtaaatgcggcaatcaaagagtatggtgattttgacaatattgtcatcgaaatggctcgagaaatgaatgaagatgacgaaaaaaaggccattaaaaagattcaagaagctaacaaatctgaaaaggatgcggccatgcgtaaggctgccaatcaatataatggaaaagctgaattaccacatagcgttttccatggtcataagcaattagcgactaaaatccgcctatggcatcagcaaggagaacgttgcctttatactggtaaaacaatttcaatccatgatttgattaacaatcctaatcaatttgaaatagatcatattttacctctctctattacctttgatgatagccttgccaataaggttttggtttatgcaactgctaaccaagaaaaaggccaacgaacaccttaccaggcattagatagtatggatgatgcatggtctttccgtgaactgaaagcttttgtacgtgagtcgaaaacactttcaaacaagaaaaaagaataccttcttacggaagaggatatttcaaaatttgatgttcgaaagaaatttattgaacgaaatcttgtagatacaagatacgcttcaagagttgtccttaatgcccttcaagaacactttagagctcgcaagattgatacaaaagtttccgtggttcgtggccaattcacatctcaattgagacgccattggggaatcgataagactcgtgatacctatcatcaccatgctgtagatgcactaattattgctgcttcaagtcagttgaatttgtggaaaaaacaaaagaatactcttgtaagttattcagaagaccaattacttgatattgaaacaggtgaacttattagtgacgatgagtacaaggaatctgtatttaaagccccttatcaacattttgttgatacattgaagagtaaagaatttgaagacagtatcttgttctcatatcaagtggattctaagtttaatcgaaagatttctgatgcaacaatttacgcaacaaggcaggctaaagtaggaaaagataagaaggatgaaacttatgtcttagggaaaatcaaagatatctatagccaggctggctatgatgcctttataaagatttatcagaaggataagtcaaaattcctcatgtatcgtcacgacccacaaacctttgagaaagttatcgagccaattttagagaactatcccaataaggaaatgaatgaaaaagggaaagaagtaccatgtaatcctttcctaaaatataaagaagaacatggcgactatattcgtaaatatagtaaaaaaggcaatggtcctgaaatcaagagtcttaaatactatgatagtaagttaggtaatcatattgatatcactccaaagaatagtaacaataaagttgtcttgcagtcagtttctccatggagagcggatgtctatttcaataagactactggaaaatacgaaatccttggattaaaatatgctgatctacaatttgagaaagggacaggaacatataagatttctcaggaaaaatacaatgacattaagaagaaagagggtgtagattctgattcagaattcaagttcacactttataaaaatgatttgttgcttatcaaagatacggaaacaaaagaacagcaactattccgttttctttctcgatcaatgccaaataaaaagcattatgtagagttaaagccttattcaaaagataaatttgagaagaatgagacacttattgaaattttaggtcctgcagataagtcaggacgatgtataaaaggactagcaaaatcaaatctttcaatttttaaagtaagaacagatatcctaggaaatcagcatatcatcaagaatgagggtgataagcctaagctagatttttaatattaattgttaaaaagtgttgcaattatagttgtcatatactataataatcgtgtaagggacgccttacacagttacttaaatcttgcagaagctacaaagataaggcttcatgccgaaatcaacaccctgtcattttatggcagggtgttttcgttatttaaaaaggagaaaaaatgacttggagagttgtacatgtcagtcaaagtgagaagatgcgcttaaagcttgataacttgttagtgcaaaagatgggacaagagtttacggtgccacttagtgatatttcgataatagttgctgaaggtggggatacagttgttactcttcgattattaagtgccctaagtaaatataatattgccttagttgtctgtgataatgaacatttaccaacagggatttatcactcacaaaatgggcattttagagcctacaagcgcttgaaagagcagatgaactggtctcagaaacaaaaggacaaggcatggcagattgtgacttactataaaatcaataaccaagaggatgtcctagccatgtttgaaaaaagtctggataacattagactactttcagactataaagagcagatagaaccaggtgatagaaccaatagagaggggcatgctgctaaggtctactttaatgaacttttcggtaaacaatttgtcagagtaacccagcaagaagaagatgttatcaatgctggcttaaactatggctatgctatcatgagggctcagatggctagaatagtggcgggttatggtttaaacggtttgttaggtatcttccataaaaatgaatacaatcagtttaatttggttgatgacttaatggagccatttagacagattgtagatgtttgggtttatgataatctacgagatcaagaattccttaagtatgagtataggttaggattgacagatttgctcaatgctaaaatcaaatatggcaaagagacttgttcagtgacagttgctatggacaaatatgtcaaaggctttatcaaatatatttcggaaaaagatagtagtaaatttcactgcccagtggtatcaagtttagagtggagaaaataagatgaggtatgaagcgttgaggttattatgtttttttgatttgccaatggaatccaaggatgaaaaaagaatctatcgaaattttcgtaaagaattaatttcaaatgggtttgaaatgttacaattttcggtctattatcgcacttgtcctaatagaagttttgcaaataaattttataagaagttaaagatgagtaatctacctgctggaaatgtgagacttttggcggttactgaaaagcagttttcagaaatgacattaatcataggtggcaaaactaagcaagaagaaatcgtcagtgataataagttggtggttatatgaaattttttgtacaacatccttacaaggaacgtattgaattgaatattggtgcaatcacacaaattgttggtcagaataaagaactcaaatattatatttggcagattttgagctggtattttggtggaaaaaaatactcaagtgaggacttaagtatttttgattatgaggaacctactatacttgatgagtctggagaaatagtgaagcgaagtagctatcactatatcgacatttcaagttttaaggatttacttgagcagatggaatataagaaagggacacttgcttacggttaccttagtaaaattgtcaatcaagttgatattgtagcccatttggagaaaattaatgaacaagtagagcttatagaaggggcaatgaaccagcatatcaacttaaacagtggtaaggtggaataccatttagagaatcgtcctctaacactagaccaattactttcaaaaaattttagtccattttttgccattgagaataagaatttatctttcgaatgggttgcaaataccgataaactatccctctttttagaaatgttagaccgtcttctgtcacaaacaagagagaaatatctcattgtgctaaatactattgatagttttgtctcagaggaatcttatgatagtttttataagaaaattggtcagctagcccaaaagtatccaaacctaaactttattttgtttcctagtgaccaaggatatctaaagattgacgaggaaagtagtaggttcgtcaatattttatctgaccaggtggagcatttgtacgatgttgagtttatgtatgaaagggtaaagaaacattatccaagtaataattttccgacgcgagaaggttttaggatgtccttagagactgtaacgccttatttgttaacaaaaatgacgagacaacctagtctctcactcgttgattcagtaattttgaatatcttaaatcagttgtttcactttaactattgtataagatattctcagacacctgatgaggagctattacatagatatttaaaaagtaagaattgacaagtacagtgattgattctataatcactatgtgggtataaaaacgtcaaaatttcatttgaggtttttgtactctcaagatttaagtaactgtacaacaagtacataattctcgtagcatccgtgaaagtttttgtactctcaagatttaagtaactgtacaacttagtactttactggggatactagcaatcagtttttgtactctcaagatttaagtaactgtacaactcacctcttttggctcagaatcgagcttatgtttttgtactctcaagatttaagtaactgtacaacgacttctggtgttacagcacctaccacacgtttttgtactctcaagatttaagtaactgtacaacaccgtccgtattgttaatagccttattatagtttttgtactctcaagatttaagtaactgtacaaccgctagggtcacaggtaatgctaaggtctagtttttgtactctcaagatttaagtaactgtacaacagactaagcgacttgtcaaaggtgctaaatgtttttgtactctcaagatttaagtaactgtacaacttcatggacagctacaaggatgtcaatttgtttttgtactctcaagatttaagtaactgtacaaccggttttacaagtaatcgtgcaaggtatccgtttttgtactctcaagatttaagtaactgtacaacactggtctattcgttttaaaaaccgtgcatgtttttgtactctcaagatttaagtaactgtacaacacaagggcaatcctaaagtcgaatggatgagtttttgtactctcaagatttaagtaactgtacaacgaggtgataataattgccgatatttaattgtttttgtactctcaagatttaagtaactgtacaacccactaatgcggacggcagaaagaacggtggtttttgtactctcaagatttaagtaactgtacaacctgagttgttaccgatagaaccgacgccctgtttttgtactctcaagatttaagtaactgtacaaccgcagttagttgagaatgacacgacattccgtttttgtactctcaagatttaagtaactgtacagtttgattcaacttaaaaagccagttcaactgaacttggctttttaaaatacgcgataaacataagggttgtcaggctgaccaacctctttgacctcagtcaaattgaggataggcaggctctgtttaagattttgatagtaatccacagtgatggtaccagtgacttttacccaggtattgtccttaaaagtttgatcacttcctgtcgtcgccagtccgtaaacacctgaatcggcgatacagtggatgattccaaaacggaagatgaactgataacccttggtttgtgggtcattgtaaacaaagccggtataggtgaccttcttgcccacaaaatcgttaggatagaggtagataagctccatgacttccatgtaattttccgtggtaatctggatggtctcacgtcccttgtacttggctagctctctggtcatttccttctcataagctgaggaggtgaagtaggagctggtatctggcttcaggtactgaatagtcgttccctcttggtcggcctgattaggatcgctccctgcggccagtggaaaatgatagcccttagctgacacggtattggcgtccaaggttactgttggcaccaagagccccgtgaggactggaaaggccaagagaacgatgctggctaccttggctactcgacctgacaaatgcgagtgaaccttcatctgcctcatccaaacgatgagttgaaccacagcaaggataaaggaaagcaccatggaaatgtaggccaagtaggagtagtggatgttaatgtactggttgagcttgccagaaacttgcaagtacatgacgagctcaaaatacccagataagatgagaaaacgtaacattaaatcacccccaatagcagacagtaaatgattgtcaccagacttgcggttcctacgaagagaccaacaaagcgtgttttaaattggtgtttcatcataatcaagttcttgatatcaaccataggaccaatgatgagaaaggcaaccgttggtgccactccgaaactagagagcagcgaagccccgataaaggcatcggcctctgaacaaagggagaggatgaaggccaggagcatcatgatcaggatggctgtcactgaattatgaccgatggtcgtgaggatacgggtcggtaggtaggtttgcatacttgcggccaccaagctcccgaaaatcaagtaacgcccagtgtcaaagaactcgtcaacagcatgaaccagggcttgaaagattttcttaccagctgataaaccactatagtcatgaacatgactagccttacgattgtccttgagaatctggtcatccaccacaaagcccagtaaaattcccaaaatcatggcaatcaagaaagccccaaggaaacgtaaaatcacgtagtaccaagagttcccaaaggccgtataggtggcaaagagaacgactggattaatgataggagcagttgccatgaaaggaatagccgtgtagctaggcacttttttctctaaaaagcgtgtgataattggaacaatcccacactcacaagaagggaaaataaaaccaataagagttccaaagagaatagccaggaccttgtttttagggaggaagttttggaccttttcaggagtcacaaagacctcaataaagccagataggatacttcccagtaaaacaaagggcagggcttcgataataatcgatagaaaaactgccagaagctgcaaaatgctatctggtagttgatgaaaaatagccataaaaattatttcttcttatcttcttgaagacgtttatccttcttagaatcagttcccgccttttcaaaatcagggatagccgcaaatgatgccatcatgctttcaagttcatttgtttttttctgaataactgccataaaaagcctccgagttaattaagatactaagggcgtcctttctgaaagaaatagcccctgacaataggtttacttttctattatactacctcttgcttaaaaattctcgcttcagctacaaggttttctgcccaagcaaatctcctctcgtggtataatagaacctatggaaaatcgtaatttagagacattggctcaggaattgggcctaaaaaaacaacaagttgcaactgttttggaattgaccgcagaaggcaataccatcccctttatcgcccgttaccgtaaggaaaaaacaggcaatctggatgaaacgcaaatcaaggccatcattgatatggacaagtccttgactgctcttcaagaccgtaaggaaacagttcttgccaagattgaggctcagggcaaattgaccgaccaactcaaggcagccattgaagccgctgaaaaactggcagatgtggaagagctctaccttccctataaggaaaaacgccgcaccaaggcgacggttgcccgtgaagcaggtctattccccttggctcgtcttatcttgcaaaatagtccaaacctcaaggctgaagctgaaaagctgacatctgaagcctttccaacagctgacaaggctcttgcgggtgctgtggatattttggttgaggccttttctgaggacaatagcttgcgctcttggacctacaacgaaatctggaacaacagtgacatcacttcaaccctcaaggatcaatcgctggatgaaaaagaaactttcaaaatctactatgattttgaagacaaggtgtctaaacttcaaggttaccgtaccttagcccttaaccgtggggagaaactaggcgttattaaggtggcctttaagcacaatcttgagaaaatgcaccgtttttacagtgcccgtttcaaacaaaaaaatgactatattgaggaagtcatcaaccaatctctcaagaagaaaatcattccagctatggagcgacgtatccgtagcgagttgactgaagcggcagaagatggtgcaattcaacttttctctcaaaaccttcgaagccttcttttagtttcaccacttaaaggtaagatggtactcggttttgacccagcctttcgtacaggggctaagttggccgtagttgaccaaactggtaagctcattacaacgcaagttatctatccagtggctccagccagtcaggctaagattgcccaagctaagaaagacttggctgacctcattaaaaagcatgccattgagattatcgctattggtaatggaacagccagtcgtgaaagtgaagcttttgtggcagaagtcctcaaggattttccagagacttcttatgttattgtcaatgaaagtggtgcctctgtctactctgcatcagagttggctcgacatgagttcccagacttgacggtcgaaaaacgctctgccatttccattgcccgtcgtcttcaagacccattggctgagttggttaagattgaccctaaatcaatcggagtaggccaataccagcatgatgttagtcagaagaaactctctgaaaatcttgatttcgtcgtcgataccgtggttaaccaagttggtgttaatgtcaatacggcaagtagtaccctcttgtcacacgtgtcaggactcaacaagactatctctgaaaatatcgtcgcctaccgtgaggagaatggtgagattgcatcacgtgctgaaatcaaaaaagtcccacgtcttggtgctaaagccttcgaacaagctgcaggtttccttcgtattccaaatgccaagaatatcttggataatacaggggtccacccagagtcttacccagcggtaaaagccctcttcaagaagttggctatcacagacttggacgactctgccaaggcaaaattgaaggcccttaatcttaaagaaacagcagaagagctgggacttggacaggaaaccctcaaagatatcattgctgaccttttgaaaccaggtcgtgacctccgtgatgattttgaagcacctgtgcttcgccaggatgttcttgaactcaaagatttgtcagtaggacaaaaacttgaaggaacggtccgtaacgttgtggactttggtgcctttgtggatatcggtgtccatgaggatggtcttatccacatctcagagatgagtaagagcttcgttaaccacccaagtcaggttgtctctgttggggacttggttaccgtgtgggtatcaaaagttgacttagagcatgaaaaacttaatctctccttggtgaatccgcgtgaatctaactgattatgttaagactgtttctatagaagattttggttgggaatttaagcatcaagccttgtggaacaagcgtctccgaaccactggaggtcggttctttcccaaggatggtcatttagattttaacccaaaactctatgaggaacatggtcttgaaacctttcgaaaaatcgtccgccacgaactctgtcattatcacctctattttcagggcaagggctacaagcatgcggatagagatttcaaggacttactagctaaggtcgatggccttagatacgctccaaagatgcaaggccaggaagagaattactacctctatcagtgccaatcctgtggtcgtatctaccgtcgtaaacgtcgtgtcaatacacagaaatttggttgcggtctgtgccaaggcaaactcatttttctaaatcagtcctagggctgatttttttagtctaaaaaaatcatataattaaatcaaagaaatgatgggagaagaagaccatgtcaaatcgtttttataagacacgaaaaaatagactcgtcgccggtgttgttgcaggtttggcagataagtttggctgggacctagctctggctcgtatcttggctatcattctcatggtttcaacgcagtttggaatcttcctatacttggttttagcctttctccttccttacaaagaagatatttatcccgaaatcaaactcaaggatggacgcaaacgtaaaaatgctgaacctgttgaagatgagtggaattggtaagtaattgttaatagacattaacctatgattggccttagtgctagtcataggtcttttttgctttgagagccgcattgaaaacctttttatgatacaatgaaactagtaaataatcggaggaaataatatgacagtaaccgttaaaatgttggttgacaggcttaaactcaaggttgtctatgggaataaggagcttttggcaaaaccgataacaactgctgatatctctcgtcctggtttagaaatgacaggttattttgactattattcaccggaacgactgcagttggttgggatgaaggagtggtcctaccttaaaaccatgactgaaaataaccgttattctgtttttactaatatgtttaaagaagaaactccagctgttatcgtggcgcgtggtcttaatattccggaagagatgcttcgagctgctaaggaaaatggcgtagcagttcttcaaggacgaaacggcacatcgtcactttcaggggacatgtcttggtatcttaactcacaattagctgaacgaactagtgtccatggtgttttggtagatatctacgggatgggtgttcttatccaaggagactctggaatcggtaagagtgagacagcgctcgagttggtgaaacgtgggcaccgtctagtcgctgatgaccgtgtggatatctatgctaaagatgaggaaactctctggggagaacctgcagaaattcttcgccatcttcttgaaatccgtggggttggtatcattgacgttatgagtctttatggagccagtgctgtccgtaattcatctcaagttcagttggccatctatctagaaaattttgaagacggtaaggtctttgatcgtcttggaaatgggaacgaagaagttgaattgcaaggcgttaagattccacgtgtccgcattcctgttaagacaggccgtaacgtatcagtcgttatcgaagctgcagcaatgaactaccgtgctaagcaaatgggatttgatgcaaccaaaacctttgaggaacgtttgactaacctcattagtaagaatggtgaagactaatgttagctactattgaccctattgctctaagacttggccccattagtattcattggtatgccatctgtatcgtatctggtctcttacttgccgtttacctggctcagcgttgggctcccgaaaagggaatcgaccctgaaaacatcctagattttattcttcttgcctttcctatagccattgttggtgctaggctctattatgtgattttccagtgggcttactacagtcaaaatccttctgaaatttttgcaatttggaatggtgggattgccatttatggtggcttgattgctggagcagctgtcctctattggttttctaaacgtcatgccattgctgtcttggattttctagatatcgcagcaccgggcgtaatgattgctcaaagtatcggtcgctggggaaactttattaaccaggaggcctacggaagagcagttagtcatctgaattatgttccagaatttattcgccagcagatgtatattgatggtagttatcgtgtaccgacctttctttacgaaagtctctggaacttggtcggatttatcattatcctaggactacgacgctttaataagaaactgcgtcaaggagatgtgacctcattttaccttatctggtatggtcttggacgttttgtcatcgaaggcatgcgtacggatagcctcatgtttgctggcttgcgtgtttcccaatgggtcagcatcgccattatcatcttgggtgctaccttgctctatttgcgaaagcaacgcccagaggcagattataaaatgaaaaactagtcatatagctcagactttgttataatataatgaaaattatcataacaaaggtcactggaaactggaagttctacttcagttttcttgtagcgaccttttaaaaaggtcaaaggagtcctaaactatggcagaaattgcatttcttattatcgcaatcgcacttgctgcgttcctcattgcattaatccctaccctacttcgtacccgtcatgtggttaaagaagttgaagaaacagttgctgtgcttcgtacagatattaatgtaacccttcatcaaacaaatgaaatcttggctaaggcaaacgtcttggttgaagatgttaatgaaaaagttcaaaccatcgatcctctcttcgtagcagtagctgagctttcagaaagtgtttctgacttgaatactgaagctcgttacctcggtgctaaagcaagtgcagcaggagcaagtgtcggtaaggcaggttcagcctttgctatcggtaaggttgcttcaaaactatttggtaaaaaagacaagaaaaaataaggaggtcttttcatgagtaaatttttaaacaccctaatcattggtgcagcttctggagctgcagcagcttacttctttacaactgaaaaaggtaaagctgttaaagcacgtattgatgaagaaatcgcttcattcaaagaagatccaaaagcttatcaaaatcaagtggtggaaaaagctagcgactacaaagatttggcagtcgatactttccaagactataaaacaaaatttgaaaatggcgacatcactgcggatgatttgacaaaagctgtccaagaaaaaacagctcaagttgctgactttgcaaaagagagctttgaacttatcaaagagaaaactgctcaagtaactcctgagcaagcagatgttgaagcagaaacaaaagctatcgttgatgacatcgtgattgatatcaaagacatctctgaagaagcagcagaagcaaaataaaaaagaaagcccttgaggctttttttagtacgaaaaaaacgttgactcgaaagtcagcgtttttgtgctttataatattcgattaggacataaatgcctatctgaccaatgacgctgatggtaattgcccagaagaaggcccagaaggtagccacttgtgctaccaagaaaaggaaggcaactaggactgttgaaacacagaagcttgagatacgtccaaagaaaatcatatcttgtagcttaatactattactatttaaaccttgataatcttggtaattcgtcgtttgaagacgctcagtctcgaaatcttcgatgtgatcaaattgacggtgtaagttgtcagccatgtctgcctcctttctatataaaatatctaaatcactttttcgtgtaggttaaaatacttagtcagtatttcactatttagaatctcattaataataccataaaaaatttatattgcaaagttttttttgatttttgtgaaaattatagtatttaaaaactaatttaaaatattgagatacatagttttgaacctaaaaattctaaaaaaatcaaatcatttgtgctataatgtgagttatggaaaaaatagtgattacagcgactgctgagagctacgagcaggcacgtgagctcctagaacttggcgtagatcgtatttacatcggcgaaaaagcttttggccttcgtttgcctaagcctttttcattcgcagagatgcgaaagattgcagagctggtacatgagtctggcaaggaattgactgttgccgttaacgccctcatgcaccaaggtatgatggatgctcttccagactaccttgattttcttgaagaaatcaaggcagattatattacggttggtgatgcaggagttttctacatctgtaaccgtgacaaacgtcccttcaaaatgatttatgatgcttcaactatggtaacctctagccgtcagattaatttctggggcaaacaagcgggagcttctgaagctgttttggctcgtgaaattccatctgcggaacttttcgtcatggctgaaaatcttcaaattccagctgaggttttggtttatggtgcaagtatcattcaccactcaaaacgtccgcttcttcaaaactattacaactttatcaaaacggatgaagctgttaccaaagaacgtgacctcttcctttctgaaccgggagatccagattctcactactcagtttatgaagatatgcacgggacacatatctttgccaacaatgacttggatatgatgactaaactttcagaactcgttgaacatgggtttgaccactggaagttggacggcgtttattgcccaggtgaaaactttgtaaaaatcactgagtattttgtgaaggctcgtgacctcatcgaggctggcgaattttcacaagaccaagccttcctctttgatgaggctattcataaattacacccagccaaccgtggcttggacacaggtttctatgattacgaacctgatcgtgtaaaataaaaaatcttatgctccttcgtttgagagttttccattttcagggaacgaaggagttgttcaaaacttaaaatcgacaatcttgcaaattggagaaattatgactacaactaaaaaacgcccagaggtacttgtacctgctggaactttggaaaaattgaaagtcgctgtaaattacggcgcagatgctgttttcgttggtggacaagcctatggtttgcgtagccgtgccggaaactttaccatggatgagcttcgagaaggtatcgaatatgctcacgctcgtggtgttgatgtgcacgttgcttcaaacatggttacccatgaaggaaatgaaaaaggtgctggtgagtggttccgtgaattgcgtgacatgggactcgatgctgttatcgtatctgacccagccttaattgaaatctgttcaacctacgcaccaggacttaacatccacttgtctacacaagcatctgcgacaaacgttgaaaccttccatttttggaaagagtatggtttgacccgtgtcgttttggcacgtgaggttaccatggaagagttggctgaaatccgtaagcgtacggatcttgaaattgaggcctttgtccatggcgctatgtgtatctcatattcaggtcgctgtaccctttctaaccacatgtcagaccgtgatgccaaccgtggtggttgttcacagtcttgtcgttggaaatatgacctttacgacatgccattcggccaagaacgtaagagtatcaaaggtgaagttcctgaagaatactctatgtcagccgttgacatgtgtatgattgaaaatatccctgaccttatcgataatggcgttgatagccttaaaatcgaaggtcgtatgaaatctgtccactatgtctcaacagttgctaactgttacaaggctgcctgtgatgcctacatggaaagtgcagaagccttctacgctatcaaggacgacttgattgatgaactttggaaggttgcccaacgtgaattggcaacaggtttctactacaagacaccaacagaaaacgaacaactctttggagctcgtcgtaagattccacaatataaattcgttggtgaagtcgtagactttgatccagcaactatgacagctactatccgtcaacgtaacgttatcctcgaaggtgaccacgttgaattctacggaccaggcttccgtcatttcgagtgtgatatcaaagacctccacgatgccaatggtaacaaaattgaccgtgcgccgaacccaatggaacttcttacaattactgtgtcacaagaagttaaacctggtgacatgattcgttcaactaaagaaggtttaattaacctctaccaaaaagacggttcaagcaaaactgttcgtgcctaatgacaagtcaaatcaatgggctcctggtagatgaccagagtagatgtcagcactaccattccccactagatattgttgccctaaaatgcttcgagtgccagaagtattatgcctgttatcagtgtcatgattgcttggagaagcatagctttcgagcttatccttgtcagttgaagcaggacaaggtccttatttgtggcgtttgtaggcatgagatgaccattgaggagtatcaagatgtagaagcttgtcccagttgtcacagtgccttcaacccagcttgttcaaagcactatgatatttattttgaaaaataaaaaagattgaagattctgttcacacgaacaaagtcttcaatcttttttagttaaagtagctatgatttttaagagcttttaagactggcttagttaccaaagcgacgatgagtccttttaagaggtcaggaataataaaaggtgtcaagccaacagccacagccgcagaccaacccatctttccaagaaagtgcaggctgagaataccgccaacaaagacaagtgcatcacccaaaacaaaagccacaaagattttccaaataggagtctcagcatgcgtcagttttgaagtgataaaggcgaaaaatggataggccaacaaatagccagctgaaggtccaaagaaggattggagcccaccgcctccacctgcaaaaactggtagaccaatggcgcctagaatcaggtagagggtagcagcaagtgtcgcctctcttggcttaaggatagcagcaacaagtccgacagcaaaagtttgcagagtaatgggaactgcaccgataggaataacaatttgagccagtgcagcaatgatggcagcgccaaaagctggaagaataagcgacaatgtacgattttgtgtcatttttagttaacctttcataaataaatagttaacttattatagcaagtggtttcaaaatagtcaacctaataataaaacgaggttaactgataaacttaacctcgttgtgatatgatttttagacgtttgatttcatcaagttcaatcatgctgatgatcttatcctgctcgataaagatggcttgtcgctccctgtcataatggttgatgtagcccttataggtcttctgattggatgtcagcatgaccatttgattatgatcaatagcatgatagatatcgttaataagttgattctgcattaggtggacaggtttgctgtgacctatttccacaaactgatgaagctgatgctttacggcttctaaaaagtttatcatggtcatttccctcgtttcttgataaaataattatagcatgaaaggtgaatttttgtggataacttcattctaaaacagacaattttcacagaaaaaaacgaataaagctagtggaggtaagcaaatggcagaattttcatttgaaattgaagaaaaactcttggtcttgtctgagaatgacaagggttggactaaggaactcaatcgtgtgagctttaatggcgcaccggctaaatatgacatccgtacatggagtccagaccataccaagatgggcaaggggattaccctcagcaacgaagaattccaagttctcgttgacgccttcaaaaactaaaacaaggtcagcattgcgctggccttatttttttgtttaaaacgtatcaaagataagtttgagattgagaatggttaggacaatagcgatggcataaccgaggaaggtattccacttggcattgacgtgttttcccatgagtgatttttttgaagtatagtaaatcaaagggaaaattgagaatggcaaggcaattgaaaggaatacttgtgaataaaccaagagttgatccagtgtcttttcttgatcgccgtagagaatggctacaatgataacaggtagcaaggcgaagagacgtgtgaacaaacgaattacccactgtggtaacctcatgtggaggaagccttccatgacaatctgaccagttagggtaccagtaatggtagagttttgaccactagccaagagtgccaaggcaaagagagttgaaagtgttgaactagcaaccgcaccagcaatcttagagtcctggagggcattgtacatttgtgagaaggctgaaatatcagaagcgtgaccaaagaagagagctgctcccaaaatcaagaggagagagttaaccacaaaggccaaagtcaactggatgttagaatcccaggtcatgaaacggacagccttagtcacgtctttgccatcagaatagtcaaccttacgagtctgtgacaaggatgagtgcaagtagaggttatgtggcataacggtcgcacccacaatcccaagcgccaaggtcaactggttggtatgtccagcagcatgtggctcgaagagcgttggcgtagggagataaccctctaggattcccgtaatactaggctcagacaaggctaccagatagacaaagataaccaagatggtcaaaatcaaggttgaaacaatagcctcgatttttttgaatcctagcttcatgatgagtaggagtaggaagacatctaggactgtcaccagaatggcaaccataattggaataccaaagagcaggttaagtgcgatggcagaaccaagcacctcagccaaatctgtcgccattaaggcaagctccagaatcacccaaagcgtgtatcgcaaccatttgggcgagtggtaggccgtcgcttgagccaggtccatttgagtcacaatccctaactttccagccatttgttgcaactgcatagcgattaaagatgaaattaagatgacaaaaagaagactatacttgtaggtcgccccaccgacgacactggtaatccagttccctggatccatgtaacccacggccacgagagccccaggtcccaagaaagccttaagattttgccaaaaatgattattatttggtgtatctatggattggtttacctcagaaagggaaaccttttttgaagatgtcataaacacctctttctaagtcattctgcctaaaagttgcattatttctagacagaccgacaattttattataacactatgaggaagatgtgcaaggttttgaaaggtactgacttatccttcattgatgtcatagacgacttttcagaattgtctttttatattaaactataagagtagatgatttcatagatgagggagaaaaaataattgaagacatttcaactaacagctaagaaaaagattaccctggcactcctagttgtcattgcgcttgctttggttatctttatcgttaacgtgcagatgaatcagccagataacctacctgccaactacatggagcgccttaaaaatcctggaatgacgggcgattacatcggcctctggaagtctcgctggcatgaagaaaacaaagcctggctttatcctgcgaaacaatacgctacctatgcagtagtagctttagcttgtctatcagcttgggtcacagcttcaaaagcaaaattttggaaataagaaaatgcttctctcgattgagggaagcgttttttcataacaaattaaagtttgcttgtcatgatagctttttgatagaatactatttggaggaatgttacatgtctaaaaaaatcattaatgttgtggcagcagccattgaaaaggatggcaaaatcttttgtgcccaacgaccagaaggaaaaagtttaggaggatactgggaatttcctggaggtaagttggaagaaggagaatcacctgaagaagcattaattcgagagattcatgaagaattaaattctcagattgagattatttccttcgttaatgaagcttcctatgattatgattttggaactgttgtcatgaaaacttttcatgctaaacttgtttctggaaatctagatttgttggaacatcaggattcaacttggctagagccaaatcgcttgaaaattttaaattgggcacctgtagaccgaccagctgtagaattgttatcaaaataagagcatcacaaatgtggtgctcttatttattagttatgtagcgatagagagtatcaggaataggattatctagtttgaaattcatagtaacaatactttcattaccactttccagtgggcgcactaattcttcaacagtagatggtacgatggttaagtcacctaaatagtaaaaatctccaccttcagcatcatctttaatgataaataattttagatctaatccattttcaggggaattgataattgtttttacatctggtgactcaagtgtacgcttgtttttagaaaaccattttagagtagtttcatttaataactcatcttcgtatttgatagtatcactgatttcatcatctttatgataggtgatgaagattggacaagtgttagtgttcttgtctattttatagccaccaatattaagtggaggttcatccttagaccagttaagaagtttacagacatcacgacgagaatatttttgaccgattgtaaatatttcaggataatcattcgttttgtagagtccagcctcaataacatcattaaaaagcaaggcaaaatcagagttcttgaaacaatctaggacctcaggattgagcttataaacatttttttctagagtgaccagaggttcagtaccgaatttttttacctcttgagatttaagaaattgaagacttaatacattttcaacagaggagatgattgagtctttagtagataattgttcagtttccagaatctcaataaatttatctttcgagacttcaccatttttgataagttccttaagtagaagcagctcatgttttcgtttaccaggaagaagttcaaatgtgataaaactcagccagttaatctcagtgtcagtgagttctattgacttgtttgaaaatttgttaataacatctgcatagtttttgaagctattattgttaaaaaatactattggatcaatattatcaaaggttaaatgatcgattagcataggcgttctaccaagtttattttcaagatctgtataagcatccttgagaattttcatgttagaaagaaccgtgtttgtaatcgatttgaagatttgttctttggcaacttcctcaaagttcacggttgttaaaccactcaagatatttggttcacgcagttcacggcggtaattatctttattcatcgatttatcgccaaataatgcaatcggaatcagatagttgtttttgtaattaccaataaaatcaataatagtaacgtaatccttgcttttatgcttacgaagtccacgaccaagctgctgaacaaaaatgatacttgattgcgtgttacgcaacataactacctggtttacggatggtatgtctattccctcgttaaaaatatcaacggtcaagatatattcaagctctccatcttctagttgcttaacaaccttttcacgatagttgatatcgtcatcaccagtcaatgcgatggtacgttttccatgttgattaagttttattgataattctctggcttctgcttttgatgagcaaaaaataagtccacgaacttgattattacaaacaccatagaaatcaattttatttagaatatgtttgacacgctcatctgatgtaaggtttgagatgtttgatttttcgtcaataagttgaccatcaatttcaatgtctttaacaccaaaataaacgaatggacagagcatgtcattttctaatgcatcttgtaggcgaatctcataggcaatattatagtcaaaaatctcgtagatattttggccatcagtacgttcaggagttgctgtcatacctagataaaaattcggtgtaaaatgacccataacttttttgtatgaatcagctccagccttatgcacttcgtcaatgagaatatagtcaaagaagtcttttgaaaaagcttttaggttatcctcgcgtgacaatgtttgaatagtcgcgaagatatattttttaccagttaaatcgtcacccgagtgataaatatgtccttcagagggattaaagcccagaactttttgaaaatctattaaagattttttgagaatctgttcacgatggacgataaataacatgcgttcaggattatattgtttaacgtcaaaggcagataaaaatgtcttaccagtacctgtggcactgataacgagtgccctatcttttccctgttcccgaatatttctaagtccttctagtgcagcttcttgcattttattaggaacaattttttcagccgaataagggagtttctcttcatcattaatctttgtgagactaataaccttctttctcttttgagcataggtatcaattatttcgggtgttaataactctgattgttcccaaatacggtcaaattctgatttggtattttgaatgaattccccgttatgagtagaggttagtttgatattccattcataattgatttttaaagccgtatgagtaaggttggaactacctgaaatcagtacctgtttaccaatatgttcgaagagataaaatttagcatgcatctgcattttttcaggtgttaaacggacttcaacgtttttaagttttagtagctcacgcattgcatcagggtcgttgaaatctagataaggggaaatcaagatttttcctggcactttcttgtccattagatctgataattgagacttgatcatggcaattccatttttagtgataaaggcaacagaaaagtagaaagcagtacacttactcaattcttcctgtaggtctgtcaagacataacgcttttcatcactattattcacaagaatttggggagaataaccaccctcttgatatttaatgttatcaacaaaaccaaacttaagtgattttatcaaagtgtcctgaaataaattaattccctctggcattgtataatccctttctaagaatacaaattactatcattatatcaaaaattagcttctaaataatttgttcaattagaagcttgttgacttacgtgggtgaagtgattcattacgtaataataagttataacagcacatcatttttgtgattgaagagggcatttatcgagcttttccgatgtgaaaaaacatctgaaataatgtcttacagcctcaaaagcaaaattttggaaataagaaaatgcttctctcgacttgagagaagcgtttttcatattaattgatgtgagtcttatattgactgaatatttcgtcgatatcctcttcaaccaagtgatagattttccaatcaaattcagttctagcaatatcatcaaccaagactgtataacaaaaatccatataatcttcataaaaatcagagatgaaggggaggagtgtgtcactaatatcagatgaatagagtttttcatcaagatgtttaaagagatagtctgtacccgtaatcgtttcattcttgagtttttgtgcatcctcaaggttaaatccatcactttggggattcagaaaatcgtgctttgctagccaggctacgaagacactgagatgaaagccagctcttttgctaatctctagcatatctgatttgcctagtttttctgatgggatatcattttcttcacaatagaatacaagtgcatgatcgaaaaaataatctgcgcggtctatgggaaagtctaattgactttcttctttctttgtctcaggctgttcacccacagttgattttttcttaaaaagggacttcagctttctaaacatctttatacctcatataaaaatatcccattattcaaataatgggatataattattatttcatcgttgggaacaacaagacatcacggatagttgttgtatcagtgaggagcatgcagagacggtcgataccgattccgagtccacctgttggtggcataccgtattcgagggcttcaacgtagtcgtagtcgatgcctgttgcttcgtcatcaccgagttccttagcagcagcttgtgcttcgaaacgtgacaattgatcgattgggtcgttcaattcggtgaaggcatttccgtactctttagtcatgatgaagagttcgaaacggtcagtgaagcgtgggtcttctggatttttcttagccaatggagacacagcaactgggtgaccgtaaacgaatgttggttgaatcaatgtttcttcaacgaattcttcgaagaaggcgttgatgatgtgacctacttcagtgtagtgtttttcaactggaacattcttttcagcagcgatagctttggcttcatccaaagtcatgtcttgccagaagtcaacgccagtgatttccttgatagcgtcaaccatgtggatgcgtttgaatggttcgttgatcttgatttcagttccttggtagttgataggtccgtcacctttaacagctttagcagcgtgttggatgataccttcagtcaagttcatgatatcgtggaagtcagcgtaagcttggtaaacttcgatagatgtgaactcagggttgtgagtggcatccataccttcgttacggaagatacgtccgatttcgtaaacgcgttccataccaccaacgatgagacgtttgaggtggagctcagttgcgatacgaagcaccatgtcaatgttttgtgcattgtggtgagtgatgaaaggtttagcagcagcaccaccagcttcattgtgaagaacaggtgtttctacttcaaggaaaccttgagcatcgaggtagcgacggatttcagaaatgatttttgaacgtgtgacaaagcggtcaaagctttcacggttagaaatcaaatcgaggtaacgtttacggtagattgtttcaacgtctgaaagtccgtggaatttctcaggcaatggacgaagggctttagacaagtgtgtgatatgagtagctttaatagaaagttctcccatatctgtacgcataacttcaccttcgacaccgaggaagtcaccaaggtcagctttcttgaagatttcgtagttttcttcaccgacagcatctttacgcacgtagatttggatttgaccatcgcggtcttggatgtgggcgaagccaactttacctttaccacgtttagtcatcaaacgacctgcgatagtagcagtttcgttgatttcgtgcaattcttcttttgttttgtcagcgtatttttcttttaattgaccagatgtagctgtgcgttcgaatcgcttaccaaaaggatcgattccttgttcagccaaagccgccattttttcacgacggacaatctgttgatcgttcaattcttccatgtgttgatttgacatgttagtcctccataaaatagtcgtaattattgtatcataaatcaccctctaaagataggacaaatgattaaatgtcagataaataaagctaggatttgtctatttttaggacaaatcgtaaactagcattaatctttgattagaaagttatagaatttattgacaaatataataaaaagggtgtacaatatcaaagtaagtttcgtatgatataaggaggaaatacgatgaaaaagaaaaattatgttagtaaagccgtgatgcttggcgctttactagcacctattgggatgcctacggtatctgtgttagcagatagcttttatcaaaatcaaacgagtgctcacgctgctgatattacaaactggattgccagcacacctgaacaaattacaaataatttgacaactcagaacatcaatccacagcagttagatggccaacaatacgtgattcaatggggagataccttgtggggaatctctcaagcgactgggatttctattgaaaaattagcctacgataacaatattcagaatattgaccttatctttgcaggtgatatcctcatcttgaaacgtgatggtgatgttccagcaggttatcatgtgactggtaatggttaccgttgtgcacattctaagattgttatcaacaactactatggtgataacaaccgagtgattatcaataacagcacatttgtctctgatgaccactctaagaatacagtgatttacgctccagataattctgacaatagcgtttcattctcaaatagcacaactaacaataataacgataaagacaaagatactaaagattctaaagatagcaaggattcatcttcatcatcagaatctaaagatgcttcatcaagttcaacaagtggatcatcatcttcatcttctgcatcaagctcaacagcaagcagtagtgaaagtaaagcaagtacagaaagttctaaggaaaaagaattgactgatgatgctttccaagacaaggttcaaagtgaattcgaacaagtatatcaacaaaaacgttcaggtagtcctgcatggagtttcttctcacatgcagatgataagaatggtaaaaatgttgaatataagaaagacactgaaagcaaagccctttaccttcaaggtgaaacacctaaggctcaagacattgtagatggacctaaagatggtgccaaaactgaagctaatgccaaggctcttgccgaaaagatttatgatgcccttagcaatggtggtaagttgtcagatcttatcaaggcaaaatatgctcaaattcaggtaagttataagggtgataagtgggctttcaacgttgatgtttacaaagaaaaagaaagttcatcatcaagtactgaaaaatcatcagaatctaaggcttcatcaagtgatgattctcaaacagaaacacgcatgagttcaagttcatcaagtgttgaacgttcatcatcaagttcttcaagccacactgaaacagactcagaggcaactttctctgacctaactggtgacgaatagagaggggcagcgcatgtcaaagagaaatatcattattagtgttgttcttgcttgtctcttggttacgggagctggatttggtgctttctattactggggaacacaccatttggacagtgttgtgcctgggaaggtttaccaatactcaagttctctaaatggtgaggtcaataaccgtgtcatgtatgtggccttccaagaaggtggcaataaggctcttgtaagtcaggatcgtacaacagtggttaatgctgctaagagccagactgattttgacaaggcctataatgaccaaacagctaagtgggaatacagtgtgacaaaaactaccttgactcttggtaaaaaagaggacgatcagttgtcacaatggcagtataacaaggtctttgcttatggtgaccacttcacatcaaaagacttctattatcagattgccaaaggtggtcagggtgaagtcaaacaaaaaatgaccttcaaagaaattaaataagtatctgaatatgacaagatgctttaggtttgggacaaattgttccaaacctttttctatcttcaaaacacgaataatattctcttaagtagggtccaaaattgaaatcagagggtaaaaacggtataataagactgtttgggcaattgtattctggtcaaaaaacagacgagcaagattgcccatagacagttgacttaaagctaacttttgccgggcttagacctagaagctgactgatatcatattagtcgctagtacatcagacgtgtctaagactttggtcaagagaatgatataagaaagaacggacagatgattacttctattgtttttgacgttgacgatactatttatgaccaacaggcaccttatcgtattgccatggaaaaatgtttccctgactttgatatgagtcacatgaatcaagcctacattcgtttccgccactattctgatgttggttttccacgtgtaatggctggagagtggacaaccgagtatttccgtttttggcgctgtaaagagacgcttttggagtttggctaccgtgaaattgatgaagaaacgggtaaccatttccaagaggtttacgagcatgagttggaaaatatcaccatgcttgaagagatgcgcatgacccttgatttcctcaaggaaaaaaatgtgcctatggggattattaccaatggtccgacagagcaccaacttaagaaggtgaagaagttgggactttatgattacgtggatcctaagcgtgtcatcgtcagtcaggcgacaggtttccaaaaacctgagaaggaaatcttcaaccttgcagctgagcaatttgacatgaatccatcgacgacgctctacgttggagattcttatgacaatgatgttatgggtgccttcaatggtggttggcattctatgtggtttaaccaccgtggccgtagccttaaaccaggtactaagccagtcttcgacttggaaatcgatagttttgagcaactctttggagcggtaaaagtccttttcgaccttccaaataacaaatatatctttgatatcaatgataatgaaaatccagtccttcaactaggtatcaataatggtcttatgatggcggctgaacgtcttcttgagagcaatatgagtattgataaagtggttatccttcttcgtttgaatgcgaaccaggaaaaaatccttcgtatgaaatatggaagataataaagcggcctcgtgtggccgttttatttatagagagggaagaaataatggaagtgaagctcttgaagtagtaggctttaagagctttttgagtgctaaaaagcgacccttaatcaggatcgcttgtcttatgaagtcagtcgatgatttagctaatcttgttttgttcatccatataagatgtatcattccaacatttgagagtgaagtgctcgaaatcattggtttcaaggatagtgacagaagcattgtcaagacctcctgccttacgaagaagacccggttcaaaaccaaggagggtacggatagaagctgttaggttagctccgtgaccaacaatgaggacatttttagcattactatctttaagtgttttgacaaattcggacacacgtttggttgtctggtaaacagattcagcttggaagtcattagcacggaagttggctaggttatgacggaaggcatccatttcttttggatagatggcctgaacgagtgaaattttttgcccttccagtttgccaagctgccattcacgcaaagctttagtgtaggtaactttagctttaggtttttgagactccatgatgagctctgtagtttttttagcacgtggtaggtcacttgagaagaccaagtcaaaatgagtgttactgaggtagtgacctagctcacgtacttgttcaatagattctttaagcaaaggcgagtctcccttggcgccttgaagtcggccttccaagttccactcagttttaccgtgacgtacaaaatacagtttcatgattactccttaatatcagcaaattcagcattaacaaaatcagcaagttcttgactattgatacggatagagcgcccaatttctcccgctgagacaataaggaagccagcttcttgggcagactgatcgatgtaaatagggaaattgtgtttttggcgaatacccactgggttgttggccccgtgaacatagccagttgttttttggagatccttttgtggaatcatttgaaccttcttgttccctgaaattttagctaatttcttttcagacaggtgctcggtgatagggacgatgcctatgactggtcctgtcttatcccccttaagggcgagggttttataaatgctctcacgcgccacatcttctggaagctccccttctaaaccattgaaggataagctatcatggtcaattttagctttatcaagaatttggtcaaccaaggttttcttgactttgcctttctttgccattgtcatatctccttttaaagttatacatttctaccatccattataacacaatcgtcttaacacgcctaaaccaatttgataagaagaaaaccagtgccttagacactggtttttactgactactagatgaacttgtcgaagtagtcttcttatttttagttggtttttgcttgatcttaccaaagagtttttcaaaggttttacgtttgtttttctcaggattaatttggttaagatcaaggatgttgtcgaaacctggtaggcttccttgtgacgtatactggtgaagatcatagtcgatttcagtatttggcaaagcctcataataaccagaatcggtaccataggctggaatccaaacagcgtcgaagtttttagttgaaacttcttgctcaagcatgaaataagcaccaatatagagaccaactttttcagctccaagacgtttgagctcagcgagaaaggcttggacaccttgctccatgttagacatggtttcctcttcaacgtcaatccagtaataggtaggtttgtatggagaagcatttttgtagaaaatacgagcttcttccttcatctcctttacagaagtgccttgagcgtaagagtaaacggcaactggaacgtcacgttttttgagttctttgatatgtgttttaaaagatttgtcgatcccatttgaacttgcggcattactatccttactaatctgtgatccaccgaagacgcggacgatagcaccagaaatatgatttgacaagacatcgtaatcgatatcctgaggtagttgccaccccgaaaggtcgataatgggattgagtatcagctcctcgtcggaactgctagatgttctactggttgttgtttttggtgtagtagcataaggaatagcagatttcacgttctcgagatgcgcctgctgtttggacgtattgtgaatatttgcaataactaatgctaatcctaaaagagctagaaccacgtaaacaacgatcggttttattctttttctcattactcccattctaccttaaatagcgcaaaaatgcaaaatagagtgtttataaattctgtgagagatattaaagtgactgatttccaaaaagcctttgtagtgctgacttaggcacattttatgaataagggtgttttgagctagtcttgaattaagtgaatttttcatttattaaagcaagaaatttagcttaaaagtcagtttcttccttgaaactagcgccactagtggcatcagaccaggcgacaagagcttgagcagagttatctagataggtcttgagaggttgcttcaaatcataaatggtctcccaaaatcctaggacctttccttcgttgtcgatagcagcttggtaggtctggatgaggacttgatcaaaactgtctgttggaatttgataacttctttctttggtaggagatgctagaacttcagacatgatccaatcgggcagattttcaggctcacgggggaagaaactaccgtcagcgccaccgttgtcgtagagaaagtttccttgggcatcataggctgctaatttatagggcaggtgattcagtagtgtttttaaatcgttcataccttcatcatagcttctttcatgggaaatggcaatgtattggattggagacaagactatcataggatagtatcagtttgtccgaggatagtagtatctcttacaaccgtatcagggtataataaagtaaaagaagactcgaggtgaaaatatgtcaaaacttatttttctagatgttgatgggacattggtggattatcataaccgcattccagagtcagcagtaaaggcaattcgtcaggctcgtgaaaaggggcatctggtctatgtttgtaccggacgtagcaaggcagaaatgcaaccagaattatgggaaattggcttggatgggatgattggtggcaatggttcttatgtagagcatcatggccaagtcctcatgcatcagctgatttccaaggaagatgcggcaaagattgtggaatggctgacagaacgccatcttgccttttatctggagagcaataatggtctctttgctagtcctgattttcgggagcgggcgcgtgagacactaaagacttacgctattcaaaaggggcagtctgcagagtctgttgaggggaaggaaccagaagatttcattcatggcctccagtatggtggggaactctaccgtgacgacctaaacaaggtcagtttcgttttggattcctatcaggatcacttggattccaaagaagcttttccacagcttgaagcccatacttggggtggtcgaggtgaaacagccttgtttggtgacttgggtgttaaggatattaacaaggcccatgccattgatgtccttttggaatatttgggtgctaagcgtttagataccattgctttcggagatgccaagattgatatccctatgttggaatactgtgagattggtgttgccatgggaaatggtggtccagaaatcttggctatggcagacctagtcacagacgatgttgaagctgatggcttgtacaaagcttttgatgataaattgggcttgttgcaatagaaaaaactgagttcctttttggagctcagtttgtattttatgctggtttacgaccgataaattttttcaagagatataagagatagccaacagcgatatacccagcactgatgactaggacatttaccaagaccttgttccaaccaaatttattgacattgataaagaagtaggcgaaggggctatctttggcacctggaattgggagttttagcaccaagccatttagaagggcaaaggcaaagtaagacagaggaaccacggaccagtaaattggctcacgtagacggtaggctttcttagcatcgaaaatgagggtatcaagcaccaatccccaagggacaatatagtggaccaagaagttacggagggtccagaatttctcaggttctgtaataggggccaagaggatgtgatagatgactccagtgatgaggatggccatggttacaccacccttgtaacgcaagagtttggtgttagttgtcgcatccccttttttgaagtcatagatgataaagaaaatcaaactagaaaagacaaggatattggacaaaacagtgtaatagagcaacataccccaaccatcatcatggatttggatagagactcctaccaaaccacagagagctagtaagatacggtaaaatcgtgaaatagtcataagcttccttttcctaataaataatctctcttatcatatcacatttttcactaacaatttattgaaaattctagtaaaatcaaggtaagaaagactttaaggagtaatgatgtccaatttaatcgattatcttgataaggttaaggatttgcctttcgaccaagagcctctaaatatcttggataaggtttgcatcaatgagattggctacctgacttatgaaaaatggctctcagcaagtgatttgaaggaaaccatcaatttacatgactatgctgaagggaaggacttaaatccagactacagcttcatggtgactaaggaacgggtagatttggctgaggccatggtcaggtctaggcgtttcgctggacttaatctaagtgactactgtagtgtcttggacaaggaagtggaaaaacagtttgcggctatgattttcagtcttcctgaattggactaccagcagattgtctttcgtgggacagatgatagcgtcattggttggaaggaagattttcagttgacctacagtcgggaaattcctgcccatcgctcagccatggcctttctggagaagcacttgccaaacttcagtgaccatatcgttgtttctggacactccaagggtggcaatcttgccctctattcggctgttcagagttcgactgtcttgcgtgagcaaatagcagagctcttgcttcttgattctccgggcttgatgaaatcactcttagagaagccttcttaccaagaattgaaagccaagatgacggttgtcagacctcaagaatctgttgtgggagtcatgctctattgggacaaggtcgcaaagctcgtagcagcagatggtataggcatcgctcaacacaatgttttgctttggaaggttgacttggaaacaaatgattttgtttatgtggaccagccgacagacctgagtcaacgcttaaaagagaccttccaagaatggattgagaccttgccgaatcaagaactcaagcaagtttgtgatttggtttttgataccattcttgattctggaattgaaagtctggatgatattggtatcaaaacccttcctaagctaggtcaactcttgcaagaattcggcaatctctcggaccaacaaaagaaggtcttgcaagacggtttcaaccagttactctggatattttggaagtcaggaaataaaaaatctaccctgcccaagcttgaatttcctgattttatcaagaagttgagtgaattgacaaataacgattaggggcagctgaactataggagtggaggatatcatgcctaaaaacgtacttattacaggagcaacatcaggaattggcgaagcaacggcgcgtgcctttgctaaagagggagaaaatctcatcctaacaggtcgccgtgtggagcgtcttcaagccttgaaagaggaactccaagcaacctatccagaccaaaaagtttggacttttgcactggatgttaccgatatggacatggtcaaggatgtttgccaagctattctcaaaagtgtggggcaagtccatgttttagtcaataatgcaggcctggcactaggcctaacagcctatcaagattatgaagagtgggatctgctgaccatgatcgacaccaatgtcaagggcttgatgatggtgacacgtcagattttgccaagcatggtagctgccaatgagggccatatcatcaatatgggctctacggcgggcatctatgcctatgcaggtgcagctgtgtattcagctacaaaagccgcagtgaaaactttcagcgatggtttgcgtattgataccattgccacagatatcaaggtgacaaccattcagcccggtatcgttgagacggatttttctcaagttcgctttcacggtgacaaggacaaggcagcaaaggtctatcaaggtttggaagccctccaagcccaagatattgcggaggcagtcctctacgttaccaagcaaccaagacgtgtccaggtttcagacatgaccatcatggctaaccaacaagctacagggtttaccattcatagagaggaagactaggagaagcttatgaagaatcagacgaatccagccatcggcagtagttgggaagccttgcaaacaaaactctttagcaaggaagaaattgaagccagttaccaaagagtggaaaaactcattcaggaaaaaatgggtaaataaatgataaaaacatgaccttcgggccgtgtttttttgtttgaattttcccaaaactatgaaagaaactgtgaaaatgctataatgtaagggattacgacaggacggagaggtgaaacaatggtttctagaagagagttttcagaattaactagggttcagattccagcagccttacacttaatgcgtttaggatatacatatcttccccataatggtaaggagattatgggaagagatcccgaaacaaatattttacttccaatttttagagagcaatttttaaaattcaacaattatgcaactgatttggatgttgatagagaacttaataatatcaagattgaattagatcaaaatgatttaggacgtgctttttataaccgtatagtaagtgagagtggttcaacttatattgactgggaaaaccctgaaaataatacatttcaccttgctttagaggtaacctgtcaaaatggaggagacgaatttagaccagatattgtcatttttataaatggtttgccactttcatatattgaagtaaaacaacctaatgccattcgtgatggtaagactgctattcaatctgagcaatcaagaacagctgttagatttgagaataggagatttcgtcgtttcaataatattacccaattgatttcgttctcagataatttaccttatatcagtggtcaaggtcaacaaaagcaaggatctttttactgttcaaatgcattctcaaaaactaaattcaatgcatttaaggaagaaagagaagaggagctaatttattctatacgttctttaggtgaggaggagattgatgcagtattaaaagatgttaatcgatttgccttgaaatctcagccagaatttaagacaaatcaagatccaagtacaccttgtaatacatttatctcatcactctatcaaaaggaaagactattgtttttgcttcgctacggattagcttatgtagaagagcactcgaaagatggtactattcagctgcaaaaacatgtgatgcgttatccacagttttttgcaacaaaagcaattgaggatgcaattggaaaaggagtgaagaaaggtgtcatctggcatacacaagggtctggaaaaactgccttgtcttattttaatatcaggtaccttacaaattatttctcgaaacaggaaattgttcctcagttttattttgtagttgaccgcttagatcttgcagaccaagctacgcgagagtttacgaaacgtggcttgaaagtaaaaaggattaaccgtccacaagaattaaatgaaaaacatgatgcttatcaagttgctgtcgttaatattcaaaaatttaaggataattcagatttgacggatcattcaggctacgatttaaatcgtcaaaatatctattttattgatgaagctcaccgttcatataatgagaaaggttcctatctcccaaatctatacaatgcagataaaaatgctattaaaattgcacttactggaacaccattaataacgtataaaaaagatggtaaaaccaaggaaagtcatgcaacgacccgcgatatttttggtgattatatccataaatactactacaatcaatcgattgatgatggttttacacttcgtctgatgcgtgaagagattgaaacttcttataaagagactcttcaaaccatcaatgaagaaatcttgcgtggagatctttcaaaagatgatatttttgcacatccacgttatgtctcaccaatgttggatttcattctagaagatttcaatagagcacgtgatgttgtcttcgatgatgattccatcggtggaatgattgtttgtgattcatctaagcaagctcgtgagattgaaaagcaattagaagaacgcagaagtcgtggggagacaaatatcacatcagctttaatccttcatgatgaaggtgacaaagagtacaagaaagatcgtgtagaaagctataaagaaggtaaaattgatcttgttattgtatattcgatgttactaacaggatttgatgcacctaggttgaaaagattgtacttaggccgcaaaatcaaggctcataacttacttcaaacattgacacgtgtgaatcgtccatataaggattatcaatttggctatgtgattgactttgcagatatttcgaaagaatttgataaaaccaatcgcgcttatttggaggaactcaatcaggagtatgatttaaaaaacacaggagaagatgttgaaaatgtttttggttctctctttgtttcagcagatgaaattagtaaacagcttgaaaaatcagagacaattttgatgaactatccaactgaaaatctagagttcttctctcaaactattgatgaagtgagagatagacatcaacttatcgagttacgaaaagcgctagaagcgatgaagcaattttataatgttgctcgacttttaggacatcgtgaacttctaagtaagattgacattaaccatgtatcgactttgttaaacgtgatttcaagacgtttgttgaatctctcacttatggaaaaacctgatgaattctcaagtcgaaccttgcttaatctagcaatgtctgatacgacatttagtttcgttaaaatcgcagaagaagagttacgactagcagcgaatgatctctatgagcttcgcaaacgagttgcaggtggaattaacggtcgtccagatgaaaaagaccctgaatgggtaaatctctatgaggaattccgtagaatcatgaagaaacatatgatttatgagcaggaaggcctcacaattgagaatatcaaagaaactcagactgagtatcaaaatctgtttgacgcatttgaagattataagagccgaatgcgacgactagctatgaatttcaatggcgatgaaatggcagctcgatctttcaaacatgttaccaactcaaccgtggtaagtgaatttccagttatcttccatgtgattaaaggctcaaaagccaatttagattatcagattggtctaaatcaaggtgtccttgataacaatgattttttaaaacgaatgattcgtgaacaggcacgtaaagaaatgaaaaatacagaatcagcaggaaatgaaaggttgacaaaacaagacttcaacaatcttgttgaatctttatttgaagaatacgaacaggaatatcagaactaatgaatgaacaatataaggtccaagtccaagacttggtagacgatttgaaagcagtctttacccatgctggtttagggggtgaagcaggagagtacaagctccttacccaatctttcttgtacaaattcttgaatgacaagtttctctatgaagcacaaaacgtcgattcggaaaacacttatgagcatctagtatctatgagtgaagaggattatgattggcttctagaggatatcggaacgtcaacagcttggatgaagccaaatcaattcatcgaaacgcttcatcgcaagcaaaatgaatctgatttttatgagacgtttgaaaacacactcaaccagattgccattgacaacaacgatatcttctctgtccatacagaaggggatacaactgttcgtctctttaatgagcgcctgattaccgataacatatcagatagcagtaaacgtaacgaagtcgccaaatctatcatcaatctccttgctcgtgtcaagtttgatgaggctattttttcccagggcttcgactttttctctaccatctttgagtatatgattaaggactacaacaaagatggcggggggacctatgccgagtattacacacctcactctgtcgctaagattatcgcagatatcctagtaggtaatgacaaacctcaaaatgtgcgtatctatgacccatctgctggttctggaaccttgctcatgaacctggctaatcgtattggtgtggataaggcaactgtctacagtcaggatatctcacaaaaatcatccaatctcctccgtctcaacctcatcttgaatggactgcaacactccatccataatatcgttgaaggcaataccattttacgtaatcgtcatcctgaaaagatggactatatcgtgtccaaccctcctttcaagttggacttttcagagtggcgtgaccaagtggagaccttgccagaagccagtgagcgtttctttgcaggagtgcctaaaacaccaaaaaataaaaagaattcgatggcgatttatgaactttttgtccagcatatcatctattctttaaaaccagacggtcaagcagcagttgttctgcctacaggatttattacggcgcaaaatggcattgataagaaaatccgccaacacttggtggacaatcaaatgctggcaggtgtcgtttccatgccttccaatatctttgcgacgacaggtaccaaagtttctatactctttattgataagaaaaacaagggtgatgtcgtccttatcgatgcctcaaatctcggaaccaaggtcaaggaaggcaagaaccaaaagaccgtgctatctcctgaggaagagcagaagatcgtcgagacctttatcaagaaagaagccgttgaagacttttctgtcactgtctcttatgaggaaatcaaggagaaaaactactctctcagcgcaggccaatactttgacatcaagatcgactatgtagatatcacagcagaagagtttgaagccaagatgaccgcctttcaagataaactctcagacctcttccagcaatcacatgcattagagaaggagattgaagagcaaatgaagggggtgaagtatgagtaagttagaagagtgtatactaggtgacctagttgagtttcaaagaggatatgacttgccaaaatcaaagttggtagaaggcaagtatccggtacaatcttcaaatggtattttagggtatcataatgagtataaagttgaggggcctggcattacgattggtagaagtggtacagtcggtaatcctcacttaattagagaaaatttttttcctcacaatacttcactctttgtgaaagattttaaagggaatgatattgaatacatatattattttttgcaatatttggatttaggtaatcaaaaatctggttctggtgtacctacaatgaatagaaaccatctgcatccgataaagattagggcttatcgtgataaaacatgtcaacaaaggacgattaaaattctatctttaatcgataagaaaatccaaatcaatgaccaaatcaaccaagagttggaagctttggctaagaccctctatgactactggtttgtgcagtttgatttcccagaccagaatggcaaaccctacaaatcatcaggcagaaagatggtctataacccagagctcaaacgcgaaatcccagaagggtggggagtggagaagttggatgatttgggtactattgttggtggaagtactccaacaaaatcaatttctgataatttcactaaaggtggagaaggttattcttggattacaccaaatgacttgtcaaataataaagggaataagtttataaaaaatggggaaattgatgttactgtgagaggattaaaagatgctagtttgaaattgtatccagaaggtacagttttaatgagttcaagagctccagttggctatttagcaattgcaactaaagagttaacaacaaatcaaggctttaaatcttttattcctgataaaaaatacgacaaaaactatatatactatactttacagaattgtcttaaagttattgagcaaaatgcttctggatcaacttttaaagaaatttcagcaactgttctaaaggatatcaaagttttacaaccgaatcttgagattgtgaaaaaatttgagattaaagtttcttcaatcaataactatataagagacaatgaagtccaaaaccaagaactcacccaacttcgcgattggctcttgccaatgctgatgaatggacaggtgaaggtggagtagatcatttatagctaagtaaataaaggagaaatgatgattaccgaattgcaacttccttcagatcggttttttaatgctacatatagcggtttaaagcaaaaaaattttatttacggaaaaaacggaacagggaaatcaactatcactcagacaatatctgatttattccacgctactcatgatgtaagaatttttcaaggatttgattctgtggcggaaaattcagtattgaatgcgatttcgttaggtagagaaaatgctagtatacaacctcaaattgatcaggtaagtcttcaaatttctgaattagagaaagaccttattgctaatgatagtagaccagataatctttatgcgaggtatcaatctaaggaaaaagaatataaagaacaagaaaaatctataaataataattttagctcctcagctagtaaactaaaaagagagcacactgatttaactggagtttattatgatattcgaaacttcaaaaaggatataaaatgtattgaaaacagtgtttcaagtgttctcttaagtgatactgagacagaacagcttcaacaattaatgaatcaagaagagattaagattgaaacaaaacaatcatttccaaatgttgatgtaagcggatttttagaagctacaaatgaaattatcacaacagagctagtaaaaagtatcatactagaattttcaacaattgaggaacaaaactgggttagacaaggtttgaactatcatgagaagggagatgtttgtgcgttttgcaacaatccaatttctgaacaacgtttggaccaattaaatcattattttagtgataatgttaaaaagtttgagacaaggttatcacgtgctatcgaacatttaagatctaaaaaatatgagattagtaaaataaacgtgattgaaccttctcagttctatcctatttatcgtgaacaaatttcagttttgaatacttctatcttgaaattgattcaagagtatactcaattcctagattttcttattgaaactttggaaaaacgtaagtctaatctttttacaactatgtctgaaatatcttataaaataccggatagttttgaatttattaagggacagtatggtaaaatttatgtagaaaataaaaaatacggtcaaaatttaaccataaaaaaagaagaagccaaaaataagttgagactcaatttggtaaatattgagttatctggaatggactatagtcaggagatttctgatttaaaggatttaggtaaagaaaaggaaagactggcagatgagtttcaaatcaatcagaataatttgattgctttaaggaaacaaaaagctgaccttatctcacagactatagacgaaagtatcgctgcagagagaattaacaaagcattaagaagtttaggcaatcattcgtttcagttagtcttagtttcaggtgaacaaaaagggcagtatacgataaaaaatattgatggtagcactcgagatgtagatacattaagtacaggagaaaagaatattgtatcatttttgtggtttttagcagatttggataatccatccaaaaatacagaaaacccacaaattattattttcgatgatccgatgaattcaaatgatgatacaacacaatatttaataatatcgtatttacaagatttgataaataatttatctgagaatcaacaattatttattttaactcataatattcatttctacctaaatgtaagatacgattggtggaggaaggcacctaagactaagttgactttacatcttaaaaagattgatgggaaaagtaagattttaccaatcgaaactcaagataaagatttaaaaactagctatgatgctctatggacagaattgagatggctttatcaacaagataaaccagattttatgttaaatcctattcgtcgaatttttgaaactttttcgaagtttaataacatatctcctagtgttttatttaaaaatgatgctgaagctaaaaaattatttgatgttaattcacattcaatcgacgatttagaagctgaccttaatggtaaaactaaagaagatattattgctaaagtaagagtattatttagtaataataacgcacaagcacattttgaaaagtattgggactagtatcactccttgacatgcttggtcagcttcatggaacgacaccagaagcagacgaagaactcaaggcttttgtggaagcatttaggggtagtttattagttaaatgataaaagaaggatcagtcaaatgaagttttgactggtcttttttctatgaatttgataatattaaattaccaaaaaggtaatttaaatcgaacagaaaggaatttatgaagcttatctataccaataaaactgttgagaaacagtgcactgagctgaggcgagcgaaaaaggatttttcggataaggttgcattaaagttacaccagttgattaatcttttggaagtatcggattctttggctagtgtgacggcttttcctaagtatcattttcaccaattaaagggaaagagaaatggacagtttgctttagatatagatggtcgaaggagttcctatcgtttgattgtaggatttcgggaggaagattttgagaaggtattttctagtccggtagaaatcgaaatcttgaaaatagaggaggttagcaatcattatgggtaaaaaagtggttgagtacaaagacctggttgcttttcatccgggtcagtatgttgaagacttaattgaggactataacgtaactcagaaagaatttgcggagcgtttgggagtctctgccaagactgtcagcaagctagttaatgctgaggagtctattagtaaggagacagctcataagttagccaagttaagtggtgtttctatgcagacttggctcaaccttcaaagcatttatgatgtgaaagtggctgaaattgtagaacaaagagagcttgatcaaggccgagagaaggaaatctgcgagatgattgactttaagtattttaaacaaaaaggctacgttccagagaagcgctatagtatcggtgaaaagattacagagcttcggaagattctagaagtatcgagtctagaatatctcctgacttttaaccatttagtgagttatcgtaatacacgtgattttaccgaaaagagtatcgttaattccaatatcatgttagagctagcatctaaaaaagctcgtaataaaacgaccacgaagcttaatcgcagaaagttagagaaaagtataccaacattgagagaattgacgagacaagatccaaaggattttgctcaagagttgaccgatatcttgctagagtgcggggttgtcctagtgggccttcctgctttagcaaatgccaatttaaatggtgcaacaaagaagtttggaaacggtagtgtcttgttgttattaacagatcgtaataaagcatcggatattttttggttttcacttttccatgagattggccatattctgcagaatgacttttcgtctgatcatgaaggtagcgactcttatcgacgttctgaggagctagccgaccagtttgcgaaagatttactaatttcccctcaagactatcaaagattcatagatgaggattgcttcgataaacaagcgattaagaaatttgctgatgagattggtattcatcctagcattgttttaggtcgcttgcagaatgatgagtatttgggttatgatcaatttagagacttgaaagtgaactattatttagtttcttaatagatcttatagtgcaatcaaaggctttttccgaataatagaagtagaggggctaaccctctattttttactaaggagaagtagatggaaaaaagacacaagcatgtctcaccgaccttggatattatggctaagaagattttcagcctgcctgaggtgacggtagcatttattcgagatattttggatttggatgttgtggatgctcagattttggagggaacacagcttcataaaaaggactttgacgaggatgagctcttttcaacctcggtggatgttcgagccaagttgaatgatgaaactgaggttatcattgagattcaggtacgtaagcagcattattttctcaatcgttttcattattatttagctaaccagctggtggaaaatgtgcaacaattacgtcaacaagggcagacgcataagatgtatgagcagatggagccggtttatggtatagctatcttggagaagaccttgttgccagatgaggagtcaccgattaatacttattggatggccaatagtcggacgggtaggcctttgaatgcttactataaggatgggaaacagcagaaccttcttcagattgcctttttagagttggataagtataataaagataagcatatcagggatgaagggcggcagtggctagagttctttggaaatctcccattttctaaggcacctagccgagcggtcacgcatgccgattcattactggattcatccagctggacacaggaggaaaaggcgatgattgatgaacgcatacgtattcaagaaaattatgacatgactatggaaacggcaattgatgaagcgcatgaagaaggcttggagcaaggactgaagcgaggtcgttatgagggacaactagaactgatttgtaagatgctcgcaaaaggtctatctctagaagttgtgtcagatgtgactggtctatcgcttgaagaattagagggattggtatcgtaagagccaaccgataggaggaaaaggcgatgattgatgaacgcatacgtattcaagaaaattacgacatgaccatggaaacagcaattgatgaagcgcgtgaagaaggcatagagaaagggttagagcagggactagagcgtggtcgttatgagggacaactagaaatgattcgtaagatgctctcaaaaggcctatctctagaagttgtgtcagatgttactggtctatcgcttgaagaattagaggcattgttatcgtaaaaactagctgagctacttatttttttgaaagtcagaggcagatttttgcctctttttttattttagggtgtttaacatttgtaatacttaaacattcggaaaataatactttgaagcgtaaaattaaaaaagactgtcaaacgtttgacagaaatctgagaaagtagatttaaaatatcttgacagtcttgtcttataaaacttgttaaataagccctgaaacgaaactctatttttttctttcttacacgtgaaagaaatcacctttttgtgcgacatttttagactataatttagatgtgaatgactgaactttctaatatgacaattttgttaaggccttgttaaaatggatagcctagcctttttttttactttttcatcccttataatttactttggtttgtttttaataagaaaaacaacagcattattaataatctttaatatgagggaatctttattttctttcaaaggacggcttggtcctaagatagagagattgtgaaaaaaagtatcaggagaatagacttgtttaaagaaagaaaaacgaaaccaaagtacagcatccgtaaatattctattggcgcagcatcggctttgattggcttcatggctcttgctaatgggcaagcagctcaggctgatgaggcacaatcgattagtgatttgactgatgcctcaaatcaggcacagacacctcaaacagcttcaacggcacaagtggcgacttccgaaccagcatcagttgagactgtgcaagcgtcacagcctgccaacattgctccagttctgcctcaggtaacaactgttcaagcagctgaacagactccgaccattgatcaattggttgaggcaagcaacccgcaaactcaagaaacttcagcaaatgtcttaaccaatgcgactgaggaccaaggtcaaggcaaggagtacagcacagaaggttacggtgcaaaaatgccttatacgactcataaggtagaaaatgcaagtgttgaaaatggtgctacaatccagcaatcaacggacatggaatctacggctgtggaagcgactaaccaaacttatgttgagcttcctaaaaaggatgcggcagttactttcaatgtcactgagccagccaatgctttgaatgtgcgttatacaatacctgatggtgcatcaggtcagttggatgtgcaggttaatggttcaagcgttggtaatcttgatttgtcatctcactcagcatggcagtaccttaaaggggaccatgagtatgatcaagccattgatggttccagtgcacgttttcgttttgatgagacacgtctcctcctcaaggatattcaattgaaatctggtgataagatttctctagttaaaaagaaagatgacaatgtcccttacggtattgactttattgagcttgaacaggctccagcgcctgttgcccaaggcgaaaatagtatcagtatcgtggataagggtgcatctgccaatgatgatggtgacgatacagctgccctacttgcggctgtggaagaagctaaagccagcggaaaatctgtctatattccagaaggacgtttcaattttgataaacaggttaatatcgaagctgataatctaaaaatctcaggtgccggtgtttggcatacgcaactacactttacaagtgacaaacgctatggtggtggtattgtcttcggtcataatagtaatggaattgagttgagcaatctttacatggattccaacttgacgtctcgttataacgaggatgcacagtacaaggctatttcgggaacacttggtaaggattcgaaaattcacgacatctgggttcagcattttgaagtcggtatgtggattggagactacgaccagacgggaaatatgaagtatacggatggtcttgtcgttgaaaatgctcgtatccgtaataacttggctgatggtattaactttgctcaagggaccaagaattcaacagttaagaactctaatatccgtgggaatggtgatgatggtttagctatctggtcaagtatttcagatgggacaaatgccgcagctgaggaaaataataaattcctcaacaataccattgaatcaggctggcgtgctgctggtatcggtatttttggtggtaaggggcatgaaatctcaggaaacctcatcaaggatgtctttgctggagcaggtatccgtgtaaatactgtctttgcaggtcacaattttgacctcaatgattctggaattaagattcatgacaataccattctacgttcagggacaactaatgacctctataagctccatcgtggtgccattgatttccaacaagttcgtggaacaatcaagaatgtcgatgtctacgataataagctattgaataccttggctgatccagtgattaccaaaaactttgagatgggtgacaatggtaatggagaaatccgtttatctaataatacgattgacaataaggcgacgattgttggggatgtctcagcagtttctccaacaaaatctgaaccaaagcctgtcaataatccagtctcagagacttcagtttccgagacaccaaagagtgaagcgggttcaactgcgccagtttctgaagcatcaacaagtgaagtagtttctgagacatcagcatcagaaacaccaaagagtgaagaaggttcaagcactccggtttccgaagcatcaacaagtgaagtaatttccgagacatcagcatcagaaacaccaaagagtgaagcaagctcaagtactccagtttctgaagcatcaactagtgaagtagtttctgaaacttcagcatcagaaacaccaaaaagtgaggcaagttcaagtgctccagtttccgaagtatctaacagtgaggtaatttccgagacttcagtttccgaagcatcaaacagtgaagtaatttccgaaacttcagcatcagaaataccaaagagtgaagtgggttcaagtactccagtttcagaaccatcaaacagtgaagtagcttccgagacatcagcatcagaaacaccgaaaagtgaagcaacttcaagcactccattttccgaagcatcgactagtgaggtaatctcagagacttcagtttccgaaacaccaaagagtgaagcaacttcaagcactccattttccgaagcatcgactagtgaggtaatctcagagacttcagtttccgaaacaccaaagagtgaggaaagttcaagcgccccagtttcagaagcatcaaacagtgaagtggtatccgagacatcagcatcagaaacaccaaagagtgaggcaagttcaagcactccagtttctgaagtatcaactagtgaagtagtttctgagacatcagcatcagaaacaccaaagagtgaggccggctcaagcactccagtttctgaagcatcaactagtgaagtgatctcagagtcttcagtttcagaaaccccaaagagtgaggcaagttcaagcactccagtttctgaagtatctaacagtgaagtaatctcagagacatcagtttcagaaacaccaaagagtgaggcaagttcaagcactccagtttctgaagcatctaacagtgaagtgatctcagagtcttcagtttcagaaacaccaaagagtgaagcaagctcaactgctccagtctctgagtcaccaaagaatgaggaaacttcagtagcttcatctactagtcaggttgacgtagcaattacttctgatagcccagagaaatctccaacttcagaaagcacacaaaaagatccgataagcgaggtttcttcagaagttattgaaaaaggttcaacaagtcaggttaatgttaaagtttctgaagctccaacaacagcacgtacatctgaagttgtcagcatctcgacaaatagtcaggtcgcttataacaatgacctaaaaatctctgtaacaagcagtcagctcgcttcagaagctattcgctttaattctcttttgaatgagaagtctgtggatgtgattgcaagtaaagttatggcggttgtggcctctgaaacattagcttcagaagcggcatcacttacgagctctgaaggtgttgccaaagagattagcagtgatttgtcagaattggcggaaagccagaaggatgacacacctaagaatgtcgcccgaattgataaagcaactgaggcaaaacaggtggccaagagttctgaaagccaagctagcacttcaaaagaaaaaggtaagtctaatacgacaacggtcttccttcttgtcggagttactgcagcattaagtctatctacagtttatcttacaaaacaaggtaaaaaagcaggtaaataataggtaagaaacatccattaaattgggtgtttttgtttttaagcaagctctaagatacctaatatcattattctttatttttaatcatccactttgatttggtcctgtataattaaagtgataagaaaaattaaggagttaagatgatgaaagaaaaaagaaatagtaggatttgtttatttgctcttcttcttttagtatttactttaggattcggattttcattagatactagcaaacaatctttggctgtgagctctcaagtggttcaagcggatgagaacaatggtatcttggcttttaatggtcaaaagcagtttgtcatggaggagaaggaccagctaggacgtgcccacagtgctcatatacagttacaagataaggacgagccgaagaataagcgtcccggtaaaataaaatatgatcctgtaggatggcataactataagttttattatggtgacggtaaatcaaaatcttggctaatgaatcgagggcatttgattggttatcagttttctggtgtcaatgacgagggcaagaatttagtacctatgactgcctggttgaattctggaaattataaaggaactgacgaaggtaatcagtcaggtatgctttattacgagaatcgcttggataactggctagcactccaccctaactattggttagactataaggtaacagctatctacagtggagacgagttgttgcctcgtcaagtagaacttcagtatgttggtattgatagttctggaaatctcttggaaattaaacttggtggagataaggagactcttgatagtcagggagttacgcatgttatcttggataaccaatcaccaaatgcagaaatcaattatgcagatgggacagcgacaaatacggttactgaatttactgaagcgccatctgagcctagttctgagagttcacaggtgactgaacaaccaagttctgaaccagagcctgtgcaacctgcacaagaagaaagtcgaacagtttatgtggcgcgtcatggtacagcagatgtttattggtatgacatcaacagtatgcctagcaataccaacaaagcaaatgtcgttacaatgacagaagcagatgccctagcccaaggtaaacgacacacgtctaaagagtaatacaaaagctggacatcttgtccagtttttttgtaaaacgactcagattttaccacttttatctgaaaatttgatatactgagactatcaaagatacttgaaagagaggttaattgactctttttcagtacaagaaaggaataaaaatatgatttggattattattgccattatcgttgttcttgtaatttttgttattgcaagttataacggcttggttaaaagccgtatgcagactaaggaggcatggagtcaaattgatgttcaattgaaacgtcgtaatgaccttcttcctaacttgattgagactgtaaagggatatgcaaaatacgaaggttcaacgcttgaaaaagtagcagaacttcgtaatcaagtagcagctgcgacttcaccagcagaagcgatgcgtgctagtgatgaattgacacgccaggtttctggaatctttgcggttgctgaaagttaccctgaccttaaggctagtgccaacttcagccagcttcaagaagagttgacgaacactgaaaacaaaattgcctattcacgccaactttataacagtgtaacaagtaactacaatgtgaaattggaaacattcccaagcaatgttattgctaagatgtttagctttaaggctgctgaattccttgaaacacctgaagaagaaaaagctgttcctaaggttgatttcagtggactaggtaactaatatgttatttgatcagattgctcgaaataagagaaagacttggcttttgctcctggtctttttcctcttgttgggccttgttggttacggtgtcggctatctttggttaggttcaggcttcggtggtctgattcttgctctagttatcggttttatctatgccgttaccatgattttccaatcaaccaatgtcgttatggctatgaatggtgcacgagaggttgacgaacaaaccgctccgaacctttatcatgttgttgaggatatggctatggtggcacaaataccgatgccacgtgtctttattgtcgatgatccttcaatgaatgcttttgcgacgggatctagccctaaaaatgctgcggtggctgctacgacaggtcttcttgcggttatgaatcgtgaggaacttgaaggagttattggacatgaagtgagtcatattcgcaactacgatatccgaatctctaccatagcagttgccttagcatctgccattaccatgctagctgggatggctcgtaatatgatgttctggggtggaggccgtcgtagaaatgatgatgatcgtaatggaagtagtggcttggagattattcttctcattatttctttgattgccattattctggcgcctttagcagctaccttggttcagttggccatttcacgccagcgtgaatttttagctgatgcttctagcgtcgaattgacacgtaacccacaaggtatgattaacgctctgctcaaacttgataatagtgcgccaatgcaacatcacgtggatgatgctagcgcagccctctttatcaatgaccctaaaaaagaatctggtttgcagaagctcttttatacccaccccccaatttcagaacgggtggaacgcttgaaacaaatgtaaaaaaagtgaggctgatgacacttctaagtgtgttcatcagcctcgcttttttagtttgcttcaatgtaaagattgctagcaacagtttctggaatttgaatttcttttccatcaatattcaggcggtatagtagtgtaaaagggtcaaagcctttcaaggtaaaagttactccaattttaagaccgacagtttccaaataatggagtaaatcaatttgatcctgaactcgacgaagtacatagtctccaggagttaggtcttgtgtaaaagtctgattgtagatttcctctatgagctgacctgacttggggatttgcccaccgtgtggacaggtttgagggtaattgagtaggcggtcaagcgcatcgatgaagtgatcagagacagtatgctctaaaatttcagcctcttgatgaatttgatcacaagtgtattgcaagtggtccaccaaaaagacttcgatgaggcgatgtttccgatagagttcagcgacattgattttaccagttttcgttagaagatagcccttgactttgtctttgatgatgaggtcttctgaaatcaatttcttaatcatttccgtcacagcaggtggagacacctgcatacggtttgcgatttccttattgcttattttgccttcttcagtaccaatctcatagatacatttgaggtagtcttctttgttaggtgtcatttctcttcctttgaaaatagtctcaccttagtataacagatttatcataagaatacagaatgtttcttagataagatttttactgattcaagccttgggtgattttatccagattatatttcatcatgttgtagtagctgtcaccgtcttgccctttttcagcaatagaatctgtaaagatctttgcataaataggaatattggtatccttagatactgttttcatagggcgttcatcgacactggattcgacaaagagagctggtacctttgtttgacgtagtttttccacgagtgttttgatttggtctggtgtgccttcttcttctgtattgatttcccagatgtaggcagatggtacgccataggctttagagaagtatttgaagcatccttcactagtgacaatcagttttttctcatcgggaatcttgttaaatgtctctttagcttcttggtccagtttactaagtttgtcagtataggattttagattcttttcgtagaaggtcttgtttttagggtccttagcaatcagttgcttggcaatattttgagcataaataatcccattttccagattaagccaagcgtggggatcttccttacctttttctgattgaccttcaaggtaaattacctcaacaccatcactaactgcaaaataatctttattttctgtcttatgagcattcttgactaacttagtaaaccaagcatttccaccagtttctaaattgatgccgttgtaaaaaatcaagtcagcttgcgatgtcttctttacatcatcaggaagaggttcgtattcgtgaggatccttaccaacgggtacaatactgtggagagtgattttatctccagcaatatttttggtgatatcggcaataatggaattggtcgtaacgactcgtaatttatccttgctactgccttgtttattggtacaagctgttagagtaactaccgctaaaagtagtagtactattgttgatagtatttttttcatattattttcatcctattattttattgtttataagtttttttcatgccactttgtttaggggcgatgaaaaagctgatgagaaagagtagagcagacgttaatacaatgcacgaaccagctgcaatattaaaactatagcctataaaaagacctagaacagatgccaaagcccccaatcctgatgagagaagaatcattgtttttaggctatgagcataaaggtaggcagtcgcagccggtgtaattaaaagtgccacaataagaatagtaccgacactttgcatggcagttacagcaaccaaggttagaataaccatcagtaagtaatggtagaaggagactttaactcccattgacttggccaaaattggatcaaaggatgttaggagtagagggcgaaagaagattgtaatagttgctagtacgagaagtgaaacgataatcgttatccacatgtccatgtcttgtacagctagaatattcccgaagagaatatgaaagagatctgtggaactattagcaacaccgatgagaataataccgagagctagaaagctcgaaaaggtaatcccaattgccgtgtcactcttaataatggaattacttttgatataggtaatcattgtagaagctaaaagtccaaagatgatggctcctatgaaaaagttaatacccaagataaaggaaatggctaccccaggtagaaccgcatgtgaaattgcatcacccataagtgacatccctcttagaataataaaacaaccaacagcacccccgacaattccaataactaaagccgttataagagcattttgtaagaagtggaaatttagcaaaccatcaataaattcagaaatcatttacatctcctttataaaataaactgttaccgtaggttttacggagattatcctcattaaaaataagattagtaggcccactagcaatcagtttacgatttaggaggataacttggtcaaaataatgaggaactttgctcaaatcatggtggacaataagaataagcttacctttgtccctaagttctctcaaggtgttcatgataatatcttcgctaacggagtcaatccctacaaagggttcatctaataaaataatatcagcctcttgtacaagacaacgagcgattagaacacgttgaaattgacctcctgataattggcttatttgtcgatgggccagatcatttagaccgagtagtgttaaagcctctgtgaccttagaccaatcacttttagatagacgtttaaagaacttggttttgggatagagtcctagagagatgcactctctgacagtaatcggaaagttaaaatcaatatcagccttctgtgcaacataggaaatacgattcaattgctgacgaataggttgtttattgaaaaggatttttccagagtgaggaataataccaattaatgctttaattagagttgatttaccagcaccatttggtccaataattccagtaatactaggtccctccaagtttaaggtgatattatccagagctaatgtctgttgataagacacattaatattttcaatttgaatcattagctacctccttgagtttaatatactttaaaataataattaagtcaagttaacttttgtaattaacttaactgaattatgtagtgttatcaagatgacagaggatagtgaatgagagtacattttttatatcaaatattcagcctgatcaaactgtttgatatttgggagaggctacaaggaacattatttttacaatttgtacgatttcactctgtatttcaagaaatctttagtttttattttttaaaactagtcatatttccttatttctggcataatagatatatgaaactaacgattcaacgaatggctcgaattgccattctgtcagctctggcggtaggattgcggtcagcatttataggattgccaaatattcagcctattacagctatgttttttgtggctgttctttatttgggtttggttgatggtctattgattatggctttaaccatgtccatctcaggattcatctttggttttggtccttgggtctttaatcagattctggccttcggcgtcttgatggctttttggagtttgattgcacctaggttatcacttgtctggcagattgctttggtaactcttttgtcctttttctatggagttctccttgattacgggtatggccttctatttaaaagtgggattacctttgttatttctggtctactttacgacacctatcatgcagtatcgacgcttctgttttatccattcatccagtctatttttaggaggtttttgaaatgaaaaaattatcgacctatctctttctcgccttatcacttgttaccctagcagcctgcggaaaaaatgaggcagctaaacttactagtagcacaaacaatcatcagtctaaggttcaaggtcaggtgactttgattttgaaaacggaaaaggaaagtaagaaaaaatcagtagaaatccaaaaaggtgatacagtgcttgatgtcttggaagaggtatatcctgttcaagaaaatgatggcttcatcactgagattgatggtatttctcaagataaagataagggcatctattggatgtttgatgttaatgggaaacttggtgaaaaagcagccaaccaacttaaggttgaagatggcgatgaaatcaaattctatcaaaaaaagtataattaagattctgaactctgtttcagagtcttttttttataaagttcggaaatagacttaaataattgtttgaaaaagtcggaaaattgcaaaataactgacgatttaaaggaaaatagtttacttttgttttaaaagtgatatgataaaagggtactacataaagtaaggagaatacggtttggcttttaacaaattggaaagcagtaacaaccaggaaatcatctctgaagaagttggtatcttgaaagaattgttggatgatgcaacacgaggcatggctggagagcaaggtctcacaactatccaacatttggttgaactttatgatgaaggtgactatgtggcccttacacaagccatttcagaaatgacgaatgacgatatggtcgttgcatcacgttatttctctttgttacctctcttgattaatatctctgaggacgtggatttggcttatgaagtcaaccacaagaacaatattgatgaatcttatctaggtaagttgtctgaaacctttgatgttgtcgctgaaagtgataatgcacgtgacattcttgaacatgtcaatgtcgtgccagttttgacagctcacccaactcaggttcaacgtaaaactatgcttgaattgactaaccacattcacgaacttctccgtaagcatcgtgatgttaaggctggtcttattaacaaggataaatggtatgcagatttgcgtcgttatgtagaaattatgatgcaaacagatatcattcgtgagaaaaaacttaaggttaaaaacgaaatcactaacgttatggagtattacaactcctcattgattaaggcgattacgaacctatcacatgaattcaaacgtttagcagttgaaaaaggtattgaactcgacaatccaacccctattactatgggtatgtggattggtggtgaccgtgacgggaacccatttgtaacagcagaaactcttaaactttctgcaacattgcaaagtgaagttatcctcaactactatatcgaaaaagttgataatctttaccgttcattctccctctcatcacgcttaactgaggtttcagatacagtagcagagatggcgaaacattctccagatacatctgtttatcgtgaaaatgaaccttaccgtcgtgctttcagttacatccagtctaagttgattcagacacttcttttctttaaagaaggaaactttaccaaggaaagagttgccaaacgtctttctgaaaatgttcgtctgggttcagcttcaacaggtgaagtagtagctgattacgtgcaacaacgtctcagccaaagtcttcaagctgtctcacaacaaacaacagaattctacgaaacagcagatgacttccatgatgatcttttggcaatcaaaaattcacttcttgaaaacgacgatgctgtcttgatttcaggtgatttcgaagagcttcttcaagctgtagaagtctttggtttctatcttgctacaatcgatatgcgtcaagattcaagtgttcatgaagcatgtgtagcagagttgcttaaatctgcaaatattgttgataactatagtgaattaacagaggttgaaaaggttgctgttcttcttaaagaattgcaagaagatcctcgtaccttgtcatcaactaatgtgcctaagtctgaaacacttgaaaaagaattggcaatcttccgcactgctcgtctcttgaaagactatatcggtgaagatgtcatcaaacaacatatcatttctcacactgagagcgtttctgatatgtttgagttggctatccttcttaaagaagttggcttggttgatacagaacgtgcgcgtgtccaaattgttccactttttgaaactatcgaagacttggaaaactctaatgatatcatgaaacaatatcttggttatgatatcgttaaacgttggatcaagaatagcaataattaccaagaaatcatgttgggttactcagactctaacaaagatggtggttacttatcttcaggttggacgctttacaaagctcaaaacgaattgactaagattggtgaagagcgtggtattaagattaccttcttccatggccgtggtggtactgttggtcgtggtggtggcccatcatacgatgctattacgtctcaaccatttggtactattaaggaccgtatccgtttgactgaacaaggggaagttatcggtaataaatatggtaataaggatgctgcctactacaatcttgaaatgcttgtttcagctgcccttgaccgtatggtaacacgtcaaattgcggacccagatgaattggttgatttccgtgaaattatggacggtattgttaatgattctaatgttatctatcgtgatcttgtctttggaaacgaacatttctatgactacttctttgaagcaagccctattaaagaagtgtcaagcttgaatatcggttctcgtccagcagctcgtaagactattactgagatttctggtcttcgtgcgattccttgggtattctcatggtcacaaaaccgtatcatgttcccaggttggtatggtgtgggttctgcctttaatcgctttatccaagctgaagaaggcaaccttgagaaacttcaacatatgtttgaaacatggccattcttccgttcacttttgtcaaacgtggacatggttctttcaaaatcagacatgaatatcgccttccactatgcacaattggcagagagtgaagaagtacgtagtgtcttcaatattattttggatgagtggcagttgactaaggatgttattcttgctattgaaaaacatgatggcttccttgatgaaagtccatcgcttaaagcaagtttggacttccgtttaccatacttcaatgtcttgaactacatccaaattgaattgattaaacgtcttcgtaacaatgatttgaccgatgacgaaattagccttattcacattaccatcaatggtattgcaacaggtcttcgtaactctggttaataaagtaaagttcatcactttggtggtgggctttttgttatggtgaaaaatctgttataataaaaccatgattgctatggaaacgattgaaaagctgtccaaagaaaagctccccatgataacggtcttggcgggcgaggatttagggcagtatagtcaagcaaaagaaaaatttttaaaacaaattggttttgatcccagtgacttaacctattcttattttgatatgtctgagactgattatcaagatgctgagctcgatttagaaagcatgcctttttttgcagatgagaaggtggtcatttttgaccatttcacggatatgactactgctaaaaaatcgtatctggatgagaaagagttgaagcgccttgaaaattattttgagtctcctgttgaaacaacacgtcttgtcttaatgtctgcaggaaagctagatggaaagcgtcgtttagtcaaactactcaagcgtgatgccatggtgcttgaagccagtcccttaaaagatgcagaacttagaacctattttcaaaagcaggcgcatcaagaggggcttacatttgatacaggagtctttgaggaacttttgattaagtcaaattttgacttttcagatgttcaaaaaaacttagcttttctaaaggggtataaaacggaaggaaatatctcatcgcaagatattgctgaggctattccgaaaagtttgcaagataacatttttgatatgacgcaacttcttttgcgaggacagattcagagtgttcgtgaattggttcatgatttacggcttcagggtgaagatgagattaagttgattgctgtgatgttgggacaatttcgtacctatttacaggttaaactcttatctgctcaaggcaaaagtgagcagcaaattgtttcaagtctgtctgattgtttagggcgtaaagtcaatcaatttcaggttcgttttgcactgagagatagtcgtcctttgtcagtagcgttcttaaaaatgacgattaagattttagtagagacagattaccagataaagacaggaactttagataaagattacttgtttgatttagcacttttaaaaatcgcatcaaaccgctagagatttagagttttctttgattttgtaagcaaaatttttgaaagctctaccactttacggtaaaatgaagaaaaaatgaaaagaggacctttactatggcaattatccttccagaccttccttacgcttacgatgctttggaaccatacattgatgctgaaacaatgactcttcaccacgataaacaccacgcaacttatgtagcaaatgctaatgctgctcttgaaaaacacccagaaattggtgaagatctcgaagcacttttggctgacgtggaacaaattccagcagatattcgtcaagcacttattaacaatggtggtggacaccttaatcacgcacttttctgggaactcttgtctcctgaaaaacaagaaccaactgcagaagtagcagctgctattaacgaagctttcggctcatttgaagccttccaagaagctttcacagcagcagcaacaactcgttttggttcaggttgggcatggcttgttgttaacgctgaaggtaagcttgaagtcgtttcaacagctaaccaagacactcctatctcagacggtaagaaaccaatcttggcacttgatgtttgggaacacgcttactacctaaactaccgtaacgtacgtccaaactacatcaaagctttctttgaaatcattaactggaataaagttgctgagctttatgcagcagctaaataagtttaaaattatcctcactattggggataatttttttgtaatatgattgtaaaatctccttgatttttagtgaattatagcttaaactataattgttatgaaaaaaaagaaaaaacattcaagcaaaaagtatagtggaagccgccgaaaaactaaagataaaaagaaagattcggtaaaacaagaccttcaaaaagacactaaagatactaaaaaagatgtcaaaaaaggcgctaagaaagacaacaaaaaagcatcgaaaaaagatgctaaaaagacttctaaaaaatcagtagagaagaaatctgctgaggaatcagtagtaccagttgagcacaaggaaaatgaagcaaaaactgaaaccttggcacttagaagtaagcgctctaagaaatctaaagctaaatcaaaatcatctcgtgatgataaaaaagcttatattatcttagccttcctaggtgttttggtaattcttttgtttgttgccatgcttgctttagcaggacgtggtaaacaagctggtcacactggtggccttggaaatatcttcggatctagttctaaagtcactaaaaaagaagacaaagaaaaagaggaaaaggtaactccaactaataaatcagccgaagctaaacaagcagtcatggaagcagatgcagatactatgtatggtaatggtttgtattatgattatgctaacatgacattgaaccaagtagttgaagcatttatggctgaccaaggtattgagtctagccaaattgccttttcatataaaaataccaagacaaatgagcaattctcaatgaatgatactcagccaatgactgcagggtcaacttataaattgccactaaacatgcttgtcatggatgaggttaacaagggtaaactttctttaactgaacgttttgatattactaatactgagtatgaataccaaggtgaacatgataattatgttgctgctttcggtggttcaatgactattccagagatgcaagaatattctcttgtatactctgagaatactcctgcctacgctttggcggaacgccttggtggtatggaaaaattctatggcatgctcgataaatacggtaaatcaaaaggtgaagtgaagactatccaaatgcatggtaataagacaacaacagattattacattcaagttttggattatctctggaaacatcaagataattacaaggatattctccactacattggtgagtcattcccgaatgagtattacaagacttaccttccaggtttaacgatttatcaaaaaccaggttacgttcgtgaagcacttaacgttgatgctatcgttatggaagacacaccttatatggttgcaatctatacacgttaccttggtggatcaactgaaaattcagatgaaatcagcggttggggtctccaacaattaggaatgctctcttatgtcattaatgagtggcaccgtgtcaatatgaactaataaagaaaagccgaatttatcggctttttttctatataattgaataaaaagtaagaagtaatatccctagaaaaagaaatgggacaaatggaatgcattccttaagttttcttcgtagaaggaagtaagctagtcctaataggcaggcaatttcgataattagtagtatttttgaaaatgggaaaataagtgaggcacttgctaagtagagaaaatctccttccccaatatttagatgtttcatataagaaaggatagcgaggattatacctaaggcaaatgtaatgtagtagttgcccatgaataagagtgggactgttccaactatccaaatcagaagcggataggatttatgtttcaaatcaaaaatcgacagacaaaggctgaagtaaagaaagtaggtcacttcaagacttaaaaagtcatagaaatatagcagggatattactccacaaaatagttccataaagaggtaacgaaaagggataggagtctgacatgaacggcatcgagatcttaagaaaagttgtgagaggatagggatcatctcgaaaaaacgcagctgatgcttgcaatggctacagtgacttctagggaaaataatcgacctctcaggaaaacgatcacaaattagtccgatgaatgaaccaaaagaggctcctagaaaaaaataaataatacttaacatacctaattattcgaaaaagagtgagaaaaagcattttacttgcatcttatttagaaatattctaaaataaaagtataaataatagtaattctaaataaggagtattaatatggtagattcaattaaagaaacaatcaatgaaacagttaaccaacaagctgaaacaccttcatatacaaaaactaaagcagttttgaatcaagcagtcgctgatttgtctgtagcagcttcaattgttcaccaagttcattggtatatgcgtggtcctggtttcctctatcttcatccaaaaatggatgaattgatggatagtttgaatgctcaccttgatgttgttagtgaacgtttgattactattggtggggaaccatactcaactttggtagaattttcatctaattcaggcttgactgaaactactggtacatttgataaaccaatgtctgatcaaatccaattattggttgatacatacaaatatttgtcagtcttgttccaagttggtttggatatcacagatgaagaaggagatgctccttcaaatgatatcttcactgcagctaaatctgaaattgataagacaatctggatgttgactgcagaacttggacaagctccaggcttgagataagcatttttgagttaagatgattgtcaagagttcctctaaaagtgtataatagacataaaatacttttagacgaagggaggcggcgatatgtctgagcatcgacgtagtctaggcgtttatgaagatgtcctgaatcagttaaaagctaaaggaattcggttgacggaatctcgtaaagctgttattcgctatttgatgatgtctgatcaacaccctagtgcagatgtgatatattatgacctactccctgacaatcctgggatgagtttggcgacggtctataacaacctgaaggtgttggttgaagaagggattgtctctgaaatcaaggttaataatgataatacaacctattatgattttatgggacatgaccacttaaacattgtttgtgaaaaatgtggtcacattactgacttagacttaccgattccgtctttcaaggaagaggtagaatcacaaactggatttcgcattactcgtgaacagatgattttacatgggatttgcccgaattgtcaataacctgagtctaaatgacttaggtcttttttgaagtatacaataatctgtaaaggttttcaaaactatcttgtcatggcagaagctttttgctaaaatattgctatgaaaactttatatgacgttcaacagttgttgaaacagtttggcatagtagtttacctgggaaaaaggctctatgatatcgaaatgatgaagattgaattagaagccctctaccagaatggtttggtggacaaggacagctaccttactgctgaaatgattttacgacgtgaacatcgcattgaaatggagaaagaaaatgagtaaaaaactcttgggaattgaccttggtggaacaactgttaaatttggtattttgacttcagaaggtgaagtgcaagaaaaatgggcgattgaaacaaatacgcttgaaaatggtcgtcacatcgtccctaacatcgtggagtctttgaaacaccgtttggaaatgtacggacttactgcagaagatttcattggaattggtatgggttctccaggagctgttgatcgtgaaaataaaacggttactggtgccttcaacttgaactgggcagaaactcaagaagttggatctgtcatcgaaaaagaactcggtattccatttgccattgataatgatgctaacgttgctgccctcggtgaacgttgggttggtgctggtgctaacaatcctgatgttgtctttgtgacattaggaacaggagttggtggtggcgttatcgctgatggtaacttgattcatggtgttggcggtgctggtggtgaaattggccacattatcgttgagcctgaaacaggatttgaatgtacttgcggaaacaaaggatgcttggaaactgtagcttctgcaacaggtgtcgtacgtttggcacgtcatttagcagaaggctatgaaggtaactcttctattaaagctgctgtagataatggtgagcaagtaacaagtaaagatattttcgttgccgctgccgaaggcgacaagtttgctaatagcatcgttgacaaagtctctgaatacctaggacttgcaacagcaaatatctcaaatattcttaacccagattcagttgtaatcggtggtggtgtttcagcagctggtgaattcttgcgtagccgtgttgaaggatactttacacgttatgcattcccacaagttcgccgtacaacaaaagtgaaattagcagagcttggaaatgatgctggtatcattggagctgctagccttgcacttacaattgataactaatgaatgacagaaggtgtgtctgaccaattataggtggacagcacctttttcttgttgaaaaacgtttacaatcagctgagctctgccattttgttgaaaatgtggtatactttaaaagttgaaataaaaattaaagaggaaaaaatgactaaacttagagaagatatccgtaacgtagccatcattgcccacgttgaccacggtaaaacaacacttgttgatgaattgttgaaacaatcacacactcttgacgagcgtaaagagcttgatgagcgtgcaatggactcaaacgatcttgaaaaagaacgtggaattacaatccttgccaaaaatacagccgttgcttataacggtacgcgtatcaacattatggatacaccaggtcacgcggacttcggtggagaagttgaacgtatcatgaaaatggttgatggggttgtccttgttgtcgatgcctacgaaggtacaatgcctcaaacacgttttgtgttgaaaaaagcactcgagcaaaacttgacacctatcgttgttgttaacaagattgataaaccatcagctcgtcctgaagaagttgttgatgaagttcttgaacttttcatcgagcttggtgctgatgatgatcagttggaattcccagttgtgtatgcttcagcgattaacggaacatcatcattgtcggataaccctgctgatcaagagcacactatggctccaatctttgacactattattgaccacatcccagctcctgtagataactcagatgagcctcttcaattccaagtgtcacttcttgactacaatgatttcgttggacgtatcggtattggacgtatcttccgtggaactgtaaaagttggtgaccaagttaccctttcaaaacttgacggaacaacaaagaacttccgtgttactaaacttttcggtttctttggtttggaacgtcgtgaaattgaagaagcaaaagctggtgatttgattgccatctcaggtatggaagacatcttcgttggtgaaacaattacaccaactgatgctgttgaaccattgccagttcttcgtattgacgaaccaacacttcaaatgactttcttggctaataactcaccatttgcaggtcgtgaaggtaaacacgtgacatcacgtaaggttgaagagcgtctcttggcagagttgcaaacagacgtttctcttcgtgttgatccaactgattcaccagataaatggactgtctcaggtcgtggtgaattgcacttgtcaatccttatcgaaacaatgcgtcgtgaaggatacgaacttcaagtatctcgtccagaagttatcatcaaagaaattgatggtgtgaaatgtgagccatttgaacgtgttcaaattgatactccagaagagtaccaaggttctatcatccaagccctttcagaacgtaaaggtgatatgcttgatatgcagatggttggtaacggtcaaacacgtcttatcttcctcgtaccagctcgtggacttattggattctctactgaattcttgtctatgacacgtggttacggtatcatgaaccacaccttcgaccaatacttgccagttgttgctggtgaaattggtggccgtcaccgtggtgcccttgtttctatcgatacaggtaaagcgacaacttactcaatcatgcgtatcgaagaacgtggtacaatctttgttaacccaggtactgaagtttatgaaggtatgattgttggtgaaaatgctcgtgaaaatgaccttggtgtcaatatcactacagcaaaacaaatgacaaacgtgcgttcagcaactaaggaccaaacggctgttatcaagactccacgtatcttgactcttgaagaatcacttgaattcttggatgacgatgagtacatggaagtaacgcctgaatctatccgcttgcgtaaacaaattttgaataaagcagagcgtgataaagccaataaacgtaagaaaaaagcagcagaagctgaataatatatagagaggagaagagatgttttatctgattgttgctatattgattgcatcattctatttctttattgcaccaaagtcggtaaaaaacaccatgaatcttctctttgtcatggctaccttagcattgctcctacttttagcagtgctatcaatcattaaattcttcagtttacctggtgagttctttgttacggtgggaatgcttgtattgagctatttcaccttgaaagattttttcgctatgtcagagcttaatcatgaaaaagctgaacatgaagataaataagtagcatgagattaaaagtcaatcgaatagattggctttttcttttgccaagaagaggtaactccttgaaatagcttgggataaagggtaaaatgattatgatacaatttgagagaatggacgaattatgaaatcagtaacacaatttgaaaataaaaaagttttggtccttggtttggctaaatctggtgaagcagctgcccgcctattggctaagttgggtgctattgtcacagtaaatgatgggaaaccatttgaggaaaatccatcagcacagacgcttcttgaagaagggattaaggttgtctgtggcggacatcctcttgaactattggatgaaaattttgaattaatggtgaaaaatcctggaattcgttatgacaatccaatggtagctcgtgcacttgaaaaaggcattcctgtttggactgaagtggaattagcttacctagtatctgaagcacctattatcggtattacaggctcaaatggtaagacaacaacgacaactatgattgctgatgtcctaaaccatggtggcaaatcgggtgtcttgtctggaaatatcggtttccctgcgtcagaagttgcacagtcagttactgctcaagataccttagttatggaattgtcttctttccaattgatggggattgacagcttccatccacatattgctgtgattactaacttgatgccgacacatattgactatcatggtagttttgaagaatatgtggctgctaaatggaatattcaaaatcagatgactgcggatgattttgttgttttgaacttcaatcaagatttagctaaggaattggctacacaaactaaagcacaagtagttccattctcaacagtggaaaaagtagatggtgcctatcttgaaaatggtggtctctacttcaaaggtgaattagtgatgcaagccgatgagattggcgttcctggtagtcacaatgttgaaaatgccttggcaactatagctgtagcaaaattgtcaggtatttcaaaccaagctatcaagggaactctcgcaagctttggtggggttaagcaccgtctccaattcgttgacactatcgatgaagtgaaattctataatgatagtaagtcaacaaacattttagcgacacaaaaagcactttctggttttgataatagcaaagtcattttgattgccggtggtttggaccgtggtaatgaatttgatgaactcattcctgacattactggtcttaagaaaatggtgattttaggagaatcagctccccgtgtcaaacgtgctgctgataaagcgggcgtgacttatcttgatgccaaagatgtggcagatgcgacacgtattgcttttgatcaagcaagtgcaggagatgttgtcttgttgagccctgcaaacgcaagttgggatatgtacaagaatttcgaagtgcgtggtgacgaatttatcacaactgttgagcaattgaagggatagtctatggcaaaagcgaaaaagattgtttttaccggtggtggaaccgttggacatgtgactttaaatcttatcttaattccaaaatttctcaaagatggatgggaagtgcactatatcggtgataagcacgggattgaacatgagcagattgataaatctggcttagatgtgactttccatagtattgctacaggtaaactacgtcgttatttctcatggcaaaatatgttggatgtctttaaagttggttgggggattctacagtctattgcaattattgccaagattcacccccaagcactcttttcaaagggtggatttgtctcagtgccaccggtaattgcttctaaattattaggagttcctgtatatgtgcatgagtctgacctttctatgggcttggccaataaaattgcctataaatttgcgactactatgtttacgacttttgaacaatcaaaaggattggcaaagacaaaacatgtaggtgctattacaaaggtaggaatggcgacatctaatcagtctggtgcccttgataagattaaagaacagtttgatgacaacttaaaaactgtccttttcattggtggttcagctggtgcaaaggtatttaatgattttattagtaatactccacagctgactgaaaaatataatgtcattaatatttctggggactcttcattgaataccttagaacgtcatctttatagagttgattatgtgacagatttgtaccaacctcttatggatacggcagatttagttgtaactcgtggtggctcaaatacgattttcgaattgttggctatgaaaaaacttcatttaattattcctttagggaaagaagctagccgaggagaccaacttgaaaatgctgcctattttgaacgaaaaggctacgcacgtcaattacaggaaacagaattaagttgggaaaccttgaatcatgagcttgaacaacttgttgaacatgcagagacttacaaagaagcgatggctaaatctgaggaaatcacttctcctgatgatttttataacctattagtgactagtatttcaaaaaaataaaggaatttcatggcaaaaaaggatcaagaatcacaagaaaaacaagttctcacagagtggcagaagagaaatctcgaatttttgagaaaaaaagaaaccgaagattctgaagaatttgcgaatggaaaggtcgttcattcacaagaagcgacttcaaatgagagccagccaccagtgaaaaagaaggttaaaaagaaaaaaaagaccaaaaggaagaaacgaaaaaaaggtaatacaactagtaatattccaattgcacaacaaaatcttgcaggactagttgtttttatcgctgcactcctaatcgtattttcacttttctttatttcaccttggtcaaaacaaaaggttctcactgtatcaggaacaaaaaatgctttaccagaagatgtgaaagttgcaagtggtattcttgatacagactatatcactcatgtctttttcaaccaaggaaaggttgcatcaactgttgaaaaaactaatgtttgggttaaaaaggctacagttacatatagttttccaaatcaatttaatattgcagtaaaagaatacccaatcgtggcttatcgtcaaactacaaatggttatgtttctattcttcaaagtggtaagacaggaggaacagtttcaactagtaatctacctgataaattcatcaccttaaagatggatgacgagaagaaaatcgaagagttagtaaaagaattaaataaacttgatacaaaaatcaagaataatattcaaattattaatcttacgcctactaaagcaacttcagatttactaacgattgagctgtatgatggcaattccattcgtgttccactttctcaattaacagttaagcttccttactacgagaaaattaagagtcaactttcagatggaagtattgtagatatggaagttggactttatacaacgactcctgaagttgaatcatcaaaaactgatggggataaaaagaaagataaagataagactgataaaaaagaagaaaatgcaacttctgaagaaggtcaagatactacaacatcaacggaacagcattctgaagaagaaactaattctgaaaattcaggtattcaaacagaagaaaatccaccagttggtcaggaaacaattcatcggacttcccctgctcaaggctaatattgaataataaaaaacgtaaaatgctgacattttacgtttttttatggtacaatagtatccgaataattctgtttttatacagtttacaaagatattgaatggaaagattgagaggtcgagtgaatggctagagatggcttttttacaggattagatataggaactagctcgattaaggttcttgttgctgagtttattgatggatcaatgaatgtcatcggagtaagtaatgttaagagttctggtgtgaaagatggcatcattgttgacattgacgctgcagcgaaatcaatcaaaacagctattgaacaagcagaagaaaaagctgggattgttattgagcaagtgaacgttgggcttccagctaatcttcttcaaattgagcctacacaaggtatgattcctgtaacaagtgaatcaaaagaaatcaaagatgaagatgttgaaagtgttgttcgctcagccttgacaaagagcattacacctgagcgtgaggttatctcactagttcctgaagagtttattgttgatggcttccaaggaattcgtgatcctcgtggaatgatggggattcgtcttgaaatgagaggtctcatatacacaggtccaacaacaattcttcacaaccttcgtaagacagttgaacgtgctggtattcaagtagagaatattatcatctctcctcttgcaatgacacgtgctgttctaaatgaaggtgaacgtgagtttggtgctactgttattgatatgggtggcggtcaaacaactgttgcaagcatgcgtgctcaagaacttcaatttaccaatatttattctgaaggtggcgagtacatcactaaggatatttcaaaagttttgaagacttcaatgcagattgctgaagcacttaagttcaattttggtaatgcagatattgaagaagcaagcgaaacagaaactgtccaagtagaagttgtaggtgagaattcaccagttgagattacagaaaaataccttgctgagattatctcagctcgtgtgaagcatatccttgatagagttaaacaagacttgactcgaggacgtctacttgatttgcctggtggcattgtccttgtaggtggaacagctatcatgccaggtgtggttgaagttgctcaagaaatttttgagacaaatgttaaactttacgtgccaaatcaagttggtatccgtaatccaatgtttgcaaatgtgattagtcttgttgagtatgttggtcttcttacagaagttgatatcattgcacaacaggctgtgtctggtgaagagtatcttcgtcgtaaaccaatcgacaatgaggctcctgccttgagttttgatagaactcctactccagcacctcgagtggctcctcagccaaatcctgttccagttgagaacaccattgaggtacctctgccagttgaagaagaaaatcatgaacaaaaacaaaaacttggtgatcgtgttcgtggtattttcggcagtatgtttgattaattgaatctagtaaaagcgaggaaataaaatgagtttttcatttgatagcgcatcagttcaaggtgcggtaattaaagttatcggtgtcggtggaggtggcggaaacgccatcaaccgaatgattgaagaaggtcttgctggtgttgaatttattgcagctaatactgatattcaagcactcagctcttctaaagcagaaacagtaatccaattgggtcctaaattgactcgtggccttggtgccggaggtcaacctgaagttggtcgtaaggcagctgaagaaagtgaagaaacacttacagaagcacttacaggagctgatatggtctttatcactgctggtatgggtggtggctctggtacaggggcagcaccagttattgcacgtattgcgaaaagcttgggtgcattgacagttgcagttgtgacacgtccatttggatttgaaggtaacaaacgtggtgcctttgctgtcgaaggtattcaagaattgcgtgagcaagttgatacccttcttattatctctaacaataaccttcttgaaatcgttgataagaaaacaccacttcttgaagctcttagtgaagcagataatgttcttcgtcaaggggtccaaggtattacggaccttatcactaacccaggtttgatcaacctcgactttgccgatgtgaaaacagttatggcaaataaaggtaatgcacttatgggtattggtattggttcaggtgaagaacgtattgttgaagctgcgcgcaaagcaatctattcaccacttcttgaaactactattgatggtgcagaagatgttatcgttaacgtaactggtggtcttgatatgacgcttacagaagcagaagaagcatctgaaattgttggtcaagcagctggtagcggtgttaacatttggcttggtacatcaatcgatgatacattgaaagatgaaatccgtgtaactgttgttgcaactggagttcgtcaagatcgtgctgaaaaagtatctggtatgaaagctcagccacgtaaagtgactacagctccttcacaaccatcagctcctgctcaacaagttgttcaagaagagcaacgtccagtttctcaaccttcatttgaacgtcaaccaaattttgactataatgaaacaccttcaatgcctcaagcaggagttcgtcctgcagcggcagctcctcaacaagagcagtcagcttttggtaattgggatttgagacgtgataatatttctcgtcctgaaactggtcaactagatagtcaattgactatgtctacattctcaagtgatgttgaagatgatgatgaattggagacaccaccattctttaaaaatcgttaataatgactatagaagagaataaaaataatgtttatcaagcggtaaaaagagcttgtgaaaatgctaatcgctctagcgatgacgtcaatattgttgccgtaaccaaatatgtttcaagtgatgtcgctgaagaattggttaaaacgggaatcaagcacattgctgaaaatcgcgttgataaattcttagataagtatcaagctttaaaaaattatgatttgacttggcaccttattggtaccctgcaacgtcgtaaagtaaaggatgttattaatttagttgattattttcatgctttggattctgttaaattggcagaggaaattcaaaagcgtgccgaccacaccattaattgcttcctacaagttaacgtttcaggtgaagagtcaaaacatggtttttcacctgaagaacttgatactgttctaaaacaaattgaaaatcttgataagatttgtatagttggactcatgactatggctccaattgatgcagatgctcaagaacttgataagatttttgctgagacaaatgaacttagacaatcaattcaagagaaaaaactaaagaatgttccttgtgatcagttaagcatggggatgagtcgagactatgacatggctattcagaatggatcaacctttgtcagaataggcagtgcattctttaaagagaacggagaataaccttatggcattaaaagacgcaattgataaaattgtttcatattttgataccgacgaagtaacagattatgaagatgctgctaaagaagaggctaaagaacgtccagtgaaagcacagaaacctgtgcagacacgacctcctcgtcagcaacgtcaacctgagcgttctcaggcaacagtccctcctcgtcgccaacatgttcattcagacttacaggaaactcaagtccttcgtagtttacctctgagtcgttcacaagcaaaccagggaccacaacaaatgaatacaactaaaacaacaattgcaattaaatatcctaaaaagtatgaagatgctcaggaaattgtagaactattgattgaaaacgaatgtgttttaatcgattttcaatatatgttggaagcgcaagctcgtcgttgtcttgactttattgatggtgctagcaaggtacttacaggcaacttgcaaaaagttggctcttcaatgtatttgcttacgccaattaatgtcgttgttgacatcgaagagattgggttggcacatggcaatcaagaagctaattttgacttcgacatgaagagacgttaagcgatgtctgtattactttatgttatttgggcacgtgttgttaacgtgatagagattcttcttgtagtctatgctttgttatcctggtttccaggagcttatgacactagccttggaagaatcattagacaaattgttcaaccgattctcgcaccatttcgtcgcttgaatttagcttttgctggtattgatttttcaatattggtaattgtacttctactaagcttttcacttagaattcttagatttattctactctgatgtcagatattaaaaatattgaacagcattactcgttagatgaacggccttttctagagaaggttaggggattttgtcaattagttgatgataggtacagtccttacttaactgatttcttgaatcctcgtgaaattcagattgttgaagagttagctcattactacaatttaaaattttttgtgagttctactcctgaatctgaagaatatggaagagttattcttgctcccgaatattacgagcttgatgacgaagactttgaaattaaacgcctagaaatctcttatgcgagacagttcaataaattgacacacccaaaagttttgggagcactgattaatcaacttggtcttgaccgtcaagtatttggagatattattcttgatgaagaaggacgcgttcaattttccattgcttctcatttagcaagttatgcgataatgactattactaagattggtaatgtttcggttactctaaaagaagtaagtaaagacgattggatttcaaatcaagaaaattattcacaatcttttgttttactttccagtatgcgtcttgataatgtgttggcgacggtactaaacctatcccgttctaacgccttaaaacttattgcttctggaaaagttaaattaaattatagacaaattgagaaggctaatcagacggttatgattggtgatatgatttcggttagaggttatggtcgatttcgactagctcaacgagacggattttcaaagtccgggaaagctaaaatcgttattgaaagtctgttaagacggagaaaaaagtagttatttaatttaaaccatcagatatggtaatgaaaaataaaggaggcctgtaatggctattacagcacttgatattaaagataaacagtttacaactaaatttcgtggatataatgagcaagaagttgatgaatttcttgatattattgtagatgattatgaagatttggttcgtgataatcgtgaacttgctgctcgtgtaaaagagcttgaagaaaaattggcttattttgatgaaatgaaagaatcattgagtcaatcagttattttggctcaagaaacagctgaaaaagttaaagcttcagcggctgatgaatcagctaacttgattaataaggctaacttcaatgctactcatttggttgaagaagctaaatctaaggcatctgaaattcttcgtgatgcaacagatgaagccaaacgagttgccatcgaaacagaagaacttaagcgtcaaagtcgtgtcttccaccaacgcctattggctgcagttgaaggtcaacttagcttagcaagtgctccagaatggggtgaattgttgcaaccaacagctatttatcttcaaaattcagatgctgcctttaaagaagttgttgaaaaagttttggatgagcatgtacctgattcaaatgacgcagcttcatttgatgcaactcgtcaattcactcctgatgaaatggctgaacttcaacgtcgcgttgctgaaagtaataagcaagttgaagatttctctagtccagaagttgatgaaacaaacgaagttgtctcaactccagttgattttggtattccagatactttcgagagtgaagtggcagatttcccaacttcagcaccagtagatgaagattttgatttgcaacctgagtcaacaggtgaaattaatcttaacgaaacacaaacgtttaaattgaatattagcgaataagaaaaatacaacttaccaagtatattaacagcgagtgggagatggtgtgagtcccacattccctatttggatagttatcattttcaagcattctaactgaactaagtaagttagaaggatggtcctccttacggacatatgagggagcaaatgttttttgctctgaattaaggtggtaccacgagctttcgtcctttttgatgaaggctctttttatttagtaaattaatttaaagaggagatataatgaaactcaaagaaaccttaaatctaggtaagacagcttttccaatgcgagctggacttcctaacaaagaaccaatctggcaaaaagagtgggaagatgctaagatgtatcaacgtcgtcaagagttgaaccaaggtaaacctcacttcactcttcatgatggtcctccgtatgccaatggtaatattcacgttggacatgcgatgaataaaatttctaaggatatcattgttcgttcaaaatcaatgtctggtttctatgctccttacgttcctggttgggatacgcatggtcttccaattgaacaagtgttggcaaaacaaggtgtgaaacgtaaagaacttgatcgtgctgaataccttaagatgtgtcgtgattatgcactttcacaagttgacaaacaacgtgaagatttcaaacgtcttggtgtttcggctgattgggataatccatatgttactttgacaccagactatgaagctgcacaaatccgtgtctttggtgagatggctaaaaaaggttacatctatcaaggtgcaaaaccagtttattggtcatggtcatcagagtcagcacttgctgaagccgaaatcgagtaccatgatttagtttcaacttccctttactatgccaataaggttaaggatggtaaaggagtactagacacagatacttatatcgtagtttggacaacaacaccatttacagtaacagcttcacgtggtttgactgttggtgctgatattgaatacgttctcgtaaaacctgccggagaagaccgcaaatttgtcgttgcttctgaattacttaatagtctttctgagaaattcggttggacagatgtggaagtacttcagtcataccgtggagaagaattgaatcaaatcgtcactgaacacccatgggatacagaagttgatgagctagttatccttggtgatcacgttactactgattcaggtacaggtatcgtgcatacggctcctggttttggtgaggatgactataacgtaggtatcgctaatggccttgaagttgccgtaaccgttaatgagcgtggtatcatgatggaaaatgctggtcctgattttgaaggtcagttctacgataaagtggcgccgattgttatggaaaaactcggtgatttgctccttgctaaagaagaaatctcacactcatacccatttgactggcgtacgaagaaaccaatcatctggcgtgccgtaccacaatggtttgcctctgtttctaaattccgtcaagagattttggatgagattgaaaaagttaaattccattctgagtggggtaaagttcgtctttacaacatgattcgtgaccgtggtgactgggtaatctctcgtcagcgtgcttggggtgtgccactcccaatcttctacgctgaagataaaacaccaatcatgactgaagaaacaatcgaacatgtggctaaacttttcgaagagcatggttcagttatctggtgggaacgtgatgccaaagagcttcttccagaaggctttacacatccaggttcaccaaacggagagttcactaaagaaactgacattatggacgtatggtttgactcaggttcatcatggaatggtgttgttgttaaccgtcctgagttgacttatccagctgacctctatctcgaaggttcagaccaataccgtggatggtttaactcatcacttatcacatctgttgccaataatggtgttgcaccatataaacaactcttgtctcaaggttttgcgcttgatggtaagggtgaaaagatgtctaaatccctcggtaatactattgctcctagtgatgttgagaaacaatttggtgctgaaattcttcgtctttgggtaacaagtgttgatacaactaatgacgttcgtatctcaatggatatccttagccaagtatcagaatcttatcgtaagattcgtaacacacttcgtttcttgattgctaatacatctgacttcaatccaacaactgatgcagtagcctttgaagacttgcgttctgtagatcagtacatgactattcgatttaaccaattagttaagactattcgtgatgcctatgcaaactttgaattcttaactatctacaaagccttggttaactttattaacgttgagttgtctgctttctatcttgattttgccaaagatgtggtttatattgagagtgcagaatcacttgaacgtcgtcaaatgcaaacagtcttctacgatgttcttgttaagattacaaaactattgactccaattcttcctcacactgcagaagaaatttggtcatatcttgaatttgaaacagaagactatgttcaattgtcagagttgccagaagcagaagatttcgctggtcaagatgcacttcttgaaaaatggaatgccttcatggatttccgtggccaagctcaaaaagctttggaagaagcgcgtaacgaaaaagttatcggtaaatcacttgaagctcatttgacaatctatcctaatgctgaagtcaaagaacttcttgaaggtttgaacactaaccttgctcaacttttgattgtttcagcattgactattgctgaaggagatgctcctgaatctgctgtaagctttgaaggtgtagcattcacagtagaacgtgctgaaggtgatgtctgtgatcgttgccgtcgtatcgatccaactaccaaagaacgtagctacaatgcgactatctgtgatcactgtgctagcattgttgaagaaaactttgctgaaggtgtcgcagaaggttttgaagtaaaagcaaaataaaataaaaagagttcaacttgaactctttttctgtttgtttttcgaatatagtattgaacacaataaaaaaactagctcagctagttttttcttatagtccgtagttataatcatcgtcttgcatggcttcaacagtccctagaaggtaaccattaccaacttgagagaagaagtcgtggttagatgttcctgtagaaataccattcataacgattgggttaacatcgttcgcactatctgggaagagtggatcttgtcctaggttcatgagagccttgttggcgttataacgtaggaaagtcatgacttcctcagtccatccaacagcatcataaagagatttagtgtagagctcttcattttcatacaattggtagagaagatcatacatccattcacggaaactttcttgctcttcttcaggtaattcgttgaaccctagttggaatttatagccaatataggttccgtgaacagattcgtcacggataatgagcttgatgatttcagcgacgttagccagcttgttattaccaagataatagagtggagtaaagaaccctgaatagaaaaggaatgtttcaagatatgttgaagcaacctttttctgaagaggtgttccattttcatagatatcgttaatgattttcgccttggtttgtaggtattcgttactgttagtccactcgaaaatttcttcaatttcagatttagtattcaaagttgagaagattgaagagtaagatttcgcgtgaacagattccatgaactgaatgttgttcaatacagcttcttcatgaggtgtacggacgtctgcacgaatggcttcaacaccagtttgagattgcatggtatctagcaaggttaaaccaccgaaaacttttccaactaaatccttttcttcagctgaaagtttacgccagtcatcaaggtcatttgaaagtgggatacgtgtatctagccaaaattgttcggtcaatttttcccaagtagatttatcaatcgcatcttcgatttcattccagttaatggctttgtagtaagtttccattagaaacctctttctttattgatgtcgttactattttatcataattcaaaatcatgatatagttttttgagttgatctattaaaaaagtcggcgaaccgaccttttaatgcattttgtaaataagagtagcgaggttgttatcgttaaatcaccatcttagatgacacagctttcacattggttagaaccaacctcttcaccgtcatctgtataagtacggatgtagtagattgatttaattcccttgttaaaggcgtagttacgaaggatagaaagatctcgagtcgtttgtttattttctgtcttccattcgtaaatttcttttggtaactcactacgcaaaaatagggttaatgacaaaccttgatcaacgtgttcagttgcagcggcataaacatcgataactttacgcatgtccatgtcgtaggctgaagtgtagaaaggaattgtgtctgttgaaagaccgttggctggatagtagatttttccgattttcttttcttgacgttcttcaatacgttgtgtaattggatggatagaagccgaacagtcgttaatgtaagagattgagccatttggcgcaacagccaaacggttttgatggtagagtccatctttcttaacgagttcacggagttcttcccaatctttagcttgggggatgaagtggccatcgaaaagttctttgatacggtcagatttaggaacgtattggcctgtaacgtatttgtcaaagtaagaaccatcagcatattttgatttttcaaaaccgacaaaggtttcttgacgttcacgggcaatgttgttagattcaactaaagtccagtagttcataagcatgaagtagatattagtgaattcaacagattcagggctaccatactcgatatggtgtttagcgaggtaagagtgaagccccatagctcccaaaccaaaggtatgagcttgttggttaccatttttgatagatggaacagcatcaatacttgagctatctgtaacaaaggtaagcgcacgtgtcattgctctaatcgaacgaccaaagtcaggtgaagtcatcatgttaaggatattagttgatccaaggttacatgaaatgtctgtaccgagtttaacaaactcttgtgcatcgttaagttcacttggtgtttgaacttgaagaatttcagaacagaggtttgacatgataatcttaccatcgattggattgtgtcgattggctgtatcaacattgacgatatatggataacctgattcttgttggagtttagaaatttcagtttctagctcacgggcattaatcttggtttttgtgatatttggattggcaaccaactcatcgtacatagctgtaatatcaatgtagttatatggtttaccgtactctttttcgactgagtaaggactgaagaggtacatatcttcattattacgtgccaactcgtagaatttatctggaactgtaacaccaagtgatagtgtcttaacacgcaccttctcatcagcattctctttcttagtagaaaggaaggcaaggatatctgggtggaaaacatccaaataaacaacaccagcaccttgacgttggccaagttggtttgagtaagagaagctatcttcaaaaagcttcataacaggcacgacaccagaggctgccccagcatatcctttgataggagcaccagcttcacgcaggttagacaagctaatacctaccccaccaccaatacgtgataactggagggcagagttgatagaacgtccgatagaattcatgtcatccgttacttgaataaggaaacatgacacgagctcaccacgacggctacgtccagcatttagaaatgaaggagtagcaggttggtaacgttggtgaatcatttcgttagctaggtcactagctaggttttcatcaccatcagcaaagtaaagggcgttgaatagaacacgatcttcaatactttcgaggtaagactcgccatcgtttgttttgagggcatattgttggtagaacttgtaggctgccatgaaagattggaagcggaatttttgagaatgaatttctgcagacaatttttcgatgaaagcaggatcgtatttaccgatgaattcagactcaatataatcgttctcaatcaaataattaattttatctgtgatgctgttgaatgccattgaatttggcttaacgttttcaaggaagaaggcacgaagtgcttctttatccttatgcaaaggaatttgaccgttaacaggacggttaatttcgttgttgaggcggaagtatgaaacatcgccaagattttttaaagacataatacagataccaggctcagtttaatagtagattaaggttaaaacattaaactaagcaaacaagttcctttctatataaaaacttgataattaaaggatttctttaagtttagccggttgaaaacctgaaaagacgatatcgccggcttcaataactggagcagcagtgaaaccaaggcttttaacgtaatcgattttttctggctgttcatcaatgttgatttcttcgaaatcagcaccttccttttccaagaattttttagtcattttgcactgcatgcagttgtttttagaaaacaatgtaatctttgccattgcaaatactcctttataaaaagattttaagtggccaagagccactttttcgactctaatagaatacccaaaatatagggaaaaatcaagaggttgaaccgacaaaatacaatattttgtgtttagtattaaaacacaaccctatatcttgtgttttaaaggcttttataagtttcctaaattaaataggatttgtgtatggaattgactaaaaaagaaatatctaaccatacatgttatataatataacatcaaaatgccaattctatttgtttttccaaaaaaaacagtgtagaataaagaaaatttttaactaatggaggttcaagtatgcaagaatactgttcaaatctaactgtaaatggtaagacattctctttctatgatctcgaaaaagcagcaaaatctcatgacgttaaggtcggagaactaccttataccattcgaatactacttgaaagtctcctccgaaaaaaagatagcgtcgatgttaaggaatctcacatttctgatctaatgaaatttccgaattttccaacaatttctgaagtgccttttaaaccaagtcgtgttatcttacaagattttacaggagttcctgttgttgttgatttagcttcaatgcgtgatgctgtagtggctaatggtggtaaagccgaatttattaatcccgagattccagtagatttggtcatcgaccactctgtccaagtggattcatacggatgtgatactgctcttgaagacaatatcaatctagagtttaaacgtaataacgagcgctatgaatttcttaagtgggccgaacagtcttttgaaaattatcgtgcggttccaccagcaacagggattattcaccaggttaatattgaatttttgagcgatgtcattattgaaaaagatgggttactctatcctgattctatgtttggtacagatagtcacacgactatgattaatggtattggcgttcttggttggggtgttggcggtattgaagctgaagcagctatgctcggtgaagcatcttatttcccaattccagaggttattggtgtacatctgacaggagagttgcctaaaattgcaacggcaacagatttggctctcaagattactcaggtgcttcgttctgaaaatgtggttggtaaatttgttgagtactttggacctggcttgaagagtttatctctagctgaccgtgctacagttgctaatatggcaccagaatatggtgcgacttgtggttattttcctattgatgacgagactcttaactacatgcgtttaactaaccgtgatgaggaacatatccaagtcaccgaagcctatacgaaagccaatcatcttttctatgatccaagtaaagaagccaagtatactaagattgttgaaattgatttgtcatctattaaaccttctatctcaggtcctaaacgtccacaagatttgattctcttatcagatgctaagcaagaatttcaagatgcagtggtacgagaagcaggtgtccgtggttttggtttggataaggaagagttagcaaaaactgcaaacgttgactttgaggatcattcagaaacaattcaaacaggtcatgtggccattgcagctatcacatcatgtaccaatacttcaaatccttacgttcttatggcagccggtcttttagctaaaaaagcggttgagaaaggattaaaagtatctccaacagtgaagacatctttggcaccaggttctaaggttgttactggttatctcaaagcttcaggcttacaaacctatctagataagcttggctttaacttggtaggttacggttgtacaacctgtattgggaactcaggagacttacgtcctgaggtggctaaggctattgtagacactgatttattagcgagtgccgttttgtcaggaaatcgtaattttgaagggcgtattaatccacttgttaaagcgaatttcttggctagcccaccattggttgttgcttatgccttagctggtaacacgaatattgatttgacaactgaacctttaggttttgacgacaatggtcaagctgtttatttagaggatgttatgccatctcgtgaagaaattgagacttatgttgataaatacgtcactcgtcaacttttccaagatgaatatgcttatgtcttttctgatagcgagaagtggaatgccattcctactgaacaaagtcaaaattataaatggaatcaaaactctacctatattcaaaacccaccttactttgatgctttaggagatgatttgagcattaaaccattgaaagatttgaaggttttggctaaattcggagatacggttacaacagaccatatttctccggcaggtaatattgccagaaatagtccagcagctcgttatttgactgagaatggtgttgattatcaagaattcaattcttatggtagccgtcgtggtaatcatgaagtcatgatgcgaggaacctttgctaatattcgtatcaagaatgagctagcagatggaaaaattggtggatatactaaatatgatggcgacattctacctatatatgatgctgctatgaaatataaagaagctaatcaaggtacgcttgtaattgccggtaaggattatggtatgggctcaagtcgagactgggctgctaaaggtgcaaatctccttggtgtaaaagtagtgcttgctgagagttttgagcgtattcaccgttcaaatctcgttatgatggggattttaccagtccaatttatggaaggagaaaatgctgaaagtcttggattgacaggacaggagacctttagctttgacctttcagaaaatccaggtgtccatgatgttatcactgttacagcttcaacacctgaacaaaccaaaacttttaaagccttggtacgcttcgatgcagatgctgatattcgctactataaaaatggtggtatcttgccaatggttgtaagaaaaaaattgaagggagcctaatatgacaacagttgaaattaatggacttaaggatatgattgcctgtaatactaggatttcatctattatcgatgaccatttatcgtattcgggatatgatatttccgagtttatggaaaataaagcgtcttttgaggaagtgatttatctcttgtggaatggtcatcttcctacgcaaatggaacttaagtattttgaagctgagttgcgtaagaactatgatatttctgatgctgtagaacaatgcattcttatccagtctcgtccacatttgcacccaatgagtgttttacgttcaacagtctcccttcttggggtttacaatgtggacgccgaggaaagatccatggaggcaatttatcagcaaagtattgaattgatggctaaattgcctacaattattacgacttttgcacgcttacgtactggtaaaatgcccctcaaaccaagagaagatttaggttttgctgctaattttctctacatgctgaatggtgttgaaccttctgaaattgaaattgaagctatgaataaggctttaattcttcatgctgatcatgagttgaatgcctcaacttttgcagcgcgtgtttgtgcttcaaccctgacagatatctattcttgtgttacaacagctattggtgctctaaaaggtcccttgcatggtggtgctaatgaacgcgtctttgatatgcttaaagaaatccgtgaatctggtgatgttaatgcttacttgcaggaaaaacttgattctaaagagaaaatcatgggatttggacaccgtgtatacaagaaacaggatcctcgtgaaattttcttaagagatatggctaaaaagttgacagagggtactgagaatgaagaattctttaatatgtctcaagaaattgaagaattcatgaaagataagaagggattgattcccaatgtggacttctattcagccaccgtataccatactctaggaatcgacagtgatatcttcacacttatctttgctatgagtcgtgttgccggttggattgctcatattcaagagcagcaaaaaaataacaaattgattcgtccacgctcacagtacatcggacaagaaaatatgacctatattcctttagaaaaacgctagggaggaaagctatatggcagaaaaaatcgtaatgaaaaatggacagcttcaagtttctaatcgtccaattatcccttttattgaaggggatggtgttggacatgatatctggaagaatgcccaagcaatctttgataaagcagtagaagtagcctatgaaggaaagcgtcatattgagtggcaagagcttctagccggtaaaaaggcttatgacaaaacaggtgaatggttgccgaaagaaactttggaagctattcgagaaagtttagtagctattaagggaccgcttgagacgccagtaggtggtggtattcgttctttaaatgtagctttacgtcaagaacttgatctctacgcttgtgttagacctgttcgttactttgacggagtagcaagcccacttaaggaaccagaaaaaacaaatattactatcttccgtgaaaataccgaagatatttatgcggggattgaatgggaagcaggaacggcagatgtcaagcgcgtgattgagtttctccagacagaaatgaatgttaataaaattcgcttcccagaatcaagtagtatcggaatcaagccaatttcaatagaaggaagtaaacgtctcattcgctcggctatcgactatgctctcaagaacaatctaaagaaagtgacattggttcataaagggaatattcaaaaattcacagaaggtggcttctgtaaatggggttatgaagtagctcaggaagactataaagaagaattgctggctggtcgtttagagattaatgatataatcgctgataactttctccaacagattcttttaaatccagaaaaatttgatgttgttgccttaaccaacttgaatggtgattatgccagtgatgccttggctgcacaagttggtggtatcggcatctcccctggagccaacattaactatcaaacaggccatgctatttttgaagcaacacatggaacagctccggatattgcagatcaagataaggctaatccttgctcagttttattatctggctgcatgcttctagattatattggttggactgaggcagctcaactgattacaagtgctattgagaagacatttaaagctgatatctttacagctgacttagcgtttgggaaacaagcttattcaacgagtgcctttagcaatcaaattctttcaattatgtgattgtttttgctcgaaaatgaaaattaacgattgaaaacaccatgaaagaaattttctgaaaatgttgtaaataactagagactagtatttacttatgttttgaaaaatgaaaatgaccagtaaaatgagagacaagctttcgaaaaacttgtagaaagtacgttttaaccttgctaatctcaattagctatgttataattctaaattgtaagggttatcattgataactcaaatattccaaatgaagaaggagaatccattatggcttctaaagatttccacattgttgcagaaacaggtatccacgcacgtccagctactttgcttgttcaaacagctagcaaatttgcttcagatatcactcttgactacaaaggtaaagcagttaaccttaaatctatcatgggtgttatgagccttggtgttggtcaaggtgctgacgtaactatctctgcagaaggtgctgatgctgatgacgcaatcgcagcaatcgcagaaacaatgacaaaagaaggattggcataagaatatgacagaaatgcttaaaggaatcgcagcatctgacggtgttgcagttgctaaggcatatctgcttgttcaaccggacttgtcatttgaaactgtaacagttgaagatacaagtgcagaagaggctcgtctagatgctgctctagcggcgtcacaagacgagctttctgttatccgtgaaaaagcagttgaaagccttggtgaagaagcggcagccgtttttgatgctcacttgatggttcttgctgacccagaaatgactggtcaaattaaagaaactatccgtgctaaacaagttaatgctgaagctgctttgacagaagtaacagacatgtttatcgctatttttgaaggtatggaagacaacccatacatgcaggaacgtgcagcggatattcgtgacgttacaaaacgtgtgcttgctaacttgcttggtaaaaaattgcctaacccagcaacaatcaacgaagaatcaatcgttgttgctcatgacttgacaccatctgatacagctcagttgaacaaaaagtacgtaaaagcttttgttactaatatcggtggacgtactagtcactctgcaatcatggctcgtacacttgaaattgcagccgttcttggtacaaataacatcacagaacttgtcaaagatggtgacatcttggcagtttcaggtattactggtgaagttgttatcaacccaactgaagagcaaattgctgagtttaaagcagctggggaagcttacgctaaacaaaaagctgaatgggctctccttaaagatgctcaaacagttactgctgatggaaaacatttcgaattggctgctaacatcggtacacctaaagacgttgaaggtgtaaatgataatggtgcagaagctgttggtctctatcgtacagaattcttgtatatggattctcaagatttcccaactgaagatgaccaatatgaagcttacaaagcagttcttgaaggtatgaacggtaaacctgttgtcgttcgtacaatggatatcggtggggataaagaactcccttacttcgatcttcctaaagaaatgaacccattcttgggttaccgtgctttacgtatttctatctctgaaactggtaaccaaatgttccgtacacaattgcgtgcgttgcttcgtgcatctgttcacggtaaattgcgtatcatgttcccaatggttgctttgttgactgagttccgtactgctaaaggtattcttgaagaagaaaaagctaaattggttgctgaaggtgttgccgttgcagacgatatcgaagtaggtatcatgattgaaatccctgctgcagctatgcttgctgaccaatttgctaaagaagttgatttcttctcaattggtacaaacgaccttatccaatacactatggctgctgaccgtatgaacgaacaagtatcatacctttaccaaccatataacccatcaatccttcgtttgattaacaatgttatcaaagcggctcacgctgaaggtaaatgggctggtatgtgtggtgaaatggccggtgaccaaactgctgttccacttcttgtcggaatgggcttggatgagttctcaatgtcagctacatctgttcttcgtacacgtagcttgatgaagaaacttgacacagctaaaatggaagaatacgctaaccgtgcgcttactgaatgttcaacaatggaagaagttcttgaactttcaaaagaatacgttaacgtagactaatcataaaaagtggaggcttaggctttcactttttttatagctaaacagagacaaaataattgactcattctttggttaggagtagaatacggctaacctaggttaataattaaaactattttttgtcaaaattttctgaataattctcgtttaaatcttggattatttctaaaaaaatgataaaataagtcttataatagataaaaggagttactatcttggctaaacaatacaaaaactatgtcaatggtgagtggaaaacatctgaaaacgaaattactatttacgcacctgcaaacggtgaggaacttggatcagttccagcgatgagccaagctgaagtagacgaagtctacgcagcagctaaagcagcacttccagcatggcgtgcactttcatatgctgaacgtgcagcttaccttcataaagcagcagatatcttggaacgtgatgcagaaaaaatcggtcaagttctttctaaagaaatctctaaaggtttgaaatctgcaatcggtgaagttgttcgtactgctgaaatcatccactatgcagctgaagaaggtttgcgtttggaaggtgaagtacttgaaggtggtgcatttgacgcaggtagcaagaaaaaaatcgctgttgttcgtcgcgaaccagtaggtcttgtccttgctatctctccatttaactacccagtaaacttggctggttctaaaattgctcctgccttgattgctggtgacgttgttgccttcaaaccaccaacacaaggttctatctcaggtcttcttttggttgaagcatttgttgaagctggtatccctgcaggtgtcttgaactctatcacaggtcgtggttctgttatcggtgactacatcgttgaacacaaagcagttgatttcatcaacttcacaggttcaacaccagttggtgaaaatatcggtcgtttggcagctatgcgtccaatcatgcttgaacttggtggtaaagatgccgctatcgttcttgaagatgctgatcttgacttgactgctaaaaacattgttgctggtgcctttgactattcaggtcaacgttgtacagctatcaaacgtgttcttgtaatggatagtgttgcagatgaattggtagaaaaagtaactgctttggtaggtaatatcactgttggtatgcctgaagaaagcgcaagcgttacaccacttatcgatacaaaagcagctgacttcgttcaaggtttgattgatgatgccgttgaacaaggtgctactgctaaaactgaattgaaacgtgaaggtaaccttatctacccagctgtctttgaccatgtgacaactgacatgcgtcttgcttgggaagaaccatttggtccagtattgccattcatccgtgtatcttcagtagaagaagcaatcaagatttctaacgaatctgaatttggtcttcaaggtgcagtcttcactcaagactacccacgtgcgtttgcaattgctgaacaacttgaagttggtacagttcacatcaacaacaaaacacaacgtggtacagataacttcccattccttggtgttaaaggatccggtgccggaactcaaggtgtgaaatactctatcgaagctatgactcgtgtgaaatcaacagtatttgatatcgcaaactactaagagtttagctattcaatcattaaaaaagtgtaaagagtcctcattatagggactctttttcttttaaaatatggtataatagaactaaatttcgaatatagagagttttctgacaatgaataaatcttatttttacttggttatgaagacgcatgagttagaggtgccttacactgggaaacttcgtcgtgtgcgtgttcttctgcctaagaactatgaaacggatacagatcgttcttaccctgtcgtgtatttccatgatggtcagaatgttctttatagtaaggagtcattttctggctattcttggaagattatcccaacaatcaaacgtaatcctgatatttcacgtatgattgttgttgctattgataatgatggtccaggacgtatgaatgaatattctgcctggaaataccaagagtctaatatacctggtgttcagtttggaggcaagggtgtagagtatgcggaatttgttatggatgtggtaaaacccttcatcgataaggagtaccgtaccctctcagaccgtcaacacacagccatgattggatcttcccttggtgggaatattactcagtttatggggcttgattataaggaacagattggttgtctgggagtattttcttcagctaactggttgcatcaagatgcctttgatcgctacatgtcacgtcaaaaattggatgctgaccaacgtgtttacatttatgtagggactgaggaagctgatgatactgataagacactgatggctggtaacattaagcaggcttatattgactcttcattgagctattaccatgatttgattgctcgtggggttgatttggaaaatatcaagattcacattcaatctggtgctgagcataatgaagaggcttgggctgagaatttaccagactgtcttcgctttttcgctgagaagtgggattagtctatattaacaaagctatttaaaaaaataatttaggaaaaggaatataaatatgaatatcgaacatcttagccactggagtggtcaacttaatcgtgaaatgtatgttaatcgttatgggcacgccggtatccctgttgtggtttttgcttcatcaggtggtagccataatgaatattatgattttggtatgattgatgcttgtgcacgttttattgaagaaggacgcgtacagttctttacgctttcaagtgtggatagtgaaagctggctctgtgattggaaaaatccacacgaccgtgctgaaatgcatcgtgcttatgaacgttatgttattgaagaggctattccatttatcaaacacaaaactggttggtttgatcctatgatgacaacaggttgttcaatgggtgcttaccatgcgcttaatttcttcttgcaacaccctgatgttttcaacaaagtggtagcgctcagtggtgtctacgatgctcgcttctttgtgggtgagtttggaggagatgaagctatttaccaaaattctccatcagattatatctggaaccaaaatgatggttggtttatcgaccgctaccgtcaagctgagattgtcgtatgtacaggtcttggtgcttgggaacaagatggacttccatcttactataaacttaaggaagcttttgaacaaaagaatattccagcttggttctctgagtggggctatgatgtcgcacacgattgggaatggtggcgtaaacaaatgccttatttccttgacaatatgaacctataatttctttgtctatcatatctaaataactataaaagaggaattactaatgaattatcttgttatttcaccatactatccacaaaacttccaacagtttacagttgaacttgctaataagggaatcactgttcttggtattggtcaagagccttatgagcagttagatcaacctttgaaagatgctttgactgagtatttccgtgtcgataatttggaaaacttggatgaagttaagcgtgcagtagcctttcttttctacaaacatggtccaatcgatcgtatcgaatctcacaatgaatactggttggaattggatgctgctcttcgtgaacagttcaatgtttttggtgccaaaccagaagatctcaagaagactaaattcaagtctgaaatgaagaagctcttccaaaaagccggtgttccagttgttcctggtgctgtcattgaaagcgatgaagatgtggacaaggctgtgaaagaaattggtcttccaatgattgctaagccagataatggggttggtgcagcagcaaccttcaaacttgaaacagaagatgatatcaatcacttcaaggctgagtgggaccatgaaacagtttatttctttgaaaaatttgtaacttcaagtgaaatctgtactttcgatggtttgattgatcatgatggcaatattgtcttctcaacaactttcgattatgcccacactccgcttgacttgttgatgtacaagatggacaactcttattatgttcttaaggatatggatcctaagctgcgtaaatatggtgaggcaattgtcaaagaatttggcatgaaggaacgtttcttccatatcgaattcttccgtgatggtgatgattatattgctattgaatataacaaccgtccagcaggtggtttcacaatcgacgtctataactatgctcattcgtttgatttgtacaagggttatgcggatatcgttgctggtgaaccattcccagtttctcagtttgagccgctttactgtttggcgacttcgcgtcgtgcaagctcacactatgcttactcagaagaagaactttttgataagtatcgtgaacaacttaaagttaagaaaatcatgcctgcagcctttgcagagttgcaaggtgacttcctttatatgttgacaactccaagtcgtgaggaaatggaacaaatgattgaggactttggtaaaaaagcctaatctgtatatgttaaaagcacttcagagtatactgaagtgcttttgtaatgccttatttttcgtggagttcttggtttttaagaaccagttctgatactttagcgaattttttaagttttttgaggtcttctggatgggttaccaagctaatgacgctaccttcatttcccatacggccggtacgacctgcacggtgagtgtaggcttcacggtctcgagggatatcgaagttgatgaccacttccagattttcaatatcgatacctcgtgccaagaggtcagtacctagtaagagtgaaatctcatggttcttgaatttttccaagataaccttacggaatttgacgttgatgtcactagccaatgatactgctgaagctccgttaaattggaggcgctcttcagtagccccaaggtcagaaagactgttgaaaaagacaaggccacggaagtcaggaatattggagaacttacggagaagttcgacacggttacgtttatcaacactgatataataatgtttaatagtgtctagttcctgatcagataggtcataaacgatagtattttcgacaagatcttgatcgtcaattttgttggttgccgaaatataaatcatttgatggtcacgaggaacatggtggctgatttttgtcacaaagtggtattggctatcactgagaagctcatcaaattcatcaaggacgatagtattgacgttcatcatcttgatctttttgagtttaatcagctcaaagacacggccaggggttccgatgagaatttctggtcctttcttcaggcgttcaatttgtcgcttttgactagagccagaaaggaagagctgggcagtgagtcctagtggctcagcccactgtttggttacgtcgaaaatttgtccagcaagttcagaattaggtgctaggataagcaattgctgagttttttttggcttgagtgtgaggagcagtgggagaaggtaggcaagggtcttacctgttcctgtaggactgatacctaggacattgtctccttcagtgattggtgtaaagagttctttttgaatggcagtctctgtagtgattcctttttctttaaggaggtcttgccattgttcaggaaagtttttaaacataaaagtctcattttctatatggatttgcttttattatatcatgatttagtgtagaatagataagaaagactatattagataggaatttaacatgcctaaaaaaccgattattattggggttacgggtggctctggtggtggtaagaccagtgtttctcgtgccattctatcaaattttccagatgagaaaattgctatgattgagcatgattcttattataaggatcagtcacatttgacttttgaagagcgtgtgtcaactaactacgaccatccctttgccttcgatacagatcttatgattgaacacatcaatgagctgattgctgggcgtccagtggatattcccatttatgactacacccaacacactcgtagtgaaaagacttatcgtcaagagccacaggatgttttcattgttgaagggattttggtacttgaggataaacgtttgcgtgatttgatggatatcaagctttttgtagatactgatgatgacattcgtattatccgtcgtatcaagcgtgacatggaagagcgtggccgtagcttggatagtatcattgagcaatatatcagtgtggttaaacctatgtatcaccagtttatcgaaccaacgaaacgctacgcagatgtggtgattcctgaaggtgtcacaaatactgttgctatcgatttgattaatactaaggtagcaagcattttgaaagaaagtcagaaagcctaagcaggagcttggcttttttggtataattgaaacgttatgattattttacaaggaaacaagattgagcgctctttctcaggagatgtgctctttgataatattaatattcaggtagatgaacgcgatcgtattgccttggttggccgtaacggtgctggaaaatcaaccttattgaaaatcttggttggagaggaagcgccgacgagtggtgaaatcaacacaaaacgtgatttgaatttgtcttacttggctcaggatagtcgctttgagtctagcaataccatctatgcggaaatgttaaatgtctttgcagacctacgtgcagatgaaaaacgtctacgtgacatggaaatgaagatggccgagttgactggggctgatttggacaagttaatgactgactacgatcgactttccgaggatttcagacagcgaggtggatttacctatgaatctgatatcagagctattctcaatggttttaagtttgatgaaagcatgtgggagatgcctatttcagatctttctggagggcaaaacacgcgcctagctttggcgaaaatgctgcttgagaagcctgagctcttggtactggacgaaccgaccaaccacttggatatcgagaccattgcctggttggaaaattacttggtcaattatcagggagctctaatcattgtcagtcacgaccgttattttttggataaggtggcgacagtaaccctggatttgaccaaacatagtttagatcgttatgtcggaaactattccaaattcatggaccttaaggctgaaaagttggccactgaagcaaagaacttcgaaaaacaacaaaaggaaattgctaagctggaggactttgttaatcgtaatattgtccgtgcctctactactaagcgtgcccaagcccgtcgtaaacagctagagaaaatggaacgcctagataagccaacagaaggccagaagtcagccaatatgacctttcatgcggacaaggtctccgggaatgtggtcttgacagtgagggatgctgcaattggatatgatgatgagattctctcagagcctatttccctggatgttaagaagatggatgccattgccattgtgggacctaatggtatcggaaaaacaacctttatcaagtcggtagtaggtaaactgccatttatcaagggaacatcaacttatggtgccaatgttgaagtgggttactatgaccaaacccaatctgccttgacaccatcaaacacagttcttgatgagttgtggaatgattttgcgacaactcctgaagttgagattcgtaaccgtctgggagcctttctcttctcaggagatgatgtcaaaaagtcggtttctatgctttcaggtggtgagaaagctcgcctgctcctagctaaattatcaatggaaaacaataacttcctcatcctagatgagccgaccaaccacttggacattgatagtaaggaagtcttggaaaatgccctcattgactttgatggaacgcttctctttgtcagccatgaccgttactttatcaaccgtgtggcaaccaaagtgatggaaatttctgaggatggagcgaccatttatcttggagactacgattactaccttgaaaagaaggcggagcttgaagagttagcacgtcttgaggcagaggaaaatcaagtttcagaggaagtccaagtggcttcagcgggagctagtgattatcaagctcaaaaagccaatcaaaaagagatgcgtaaactaagtcgacgcattgagcaaattgaaaatgagctagagacgattgaggaacgcttggaggaaatttctgctgccatgcttgaaacaaatgatgtggcagaattgtctgacttgcagaaagagctggatgacttatcagtttctcaagaagctctgatggaagagtggagtgacttatcagaacagttggaaggttaaggaatgatgagagccttttcatgttttgagttgtgaaaggcttacattgttggtataatagtcttagtatataaaaggagactaactttatgaacaaagtaaagaaaaaagtgtatcgtaacacaacatctttcaacatgatggcatggggatcatttgccttcttcgtaatcttgatgttggtaggcctctatacccttaaagagcctttgatggttaagggttactacctcatggggtgtgttggcttgatttcatcttcctttacagtatctaaggttgtccgtgataatcaagaagatgaagaaaactataacaaactcatcgctcaacaaactttcgaacaataagaagagaagcctgaaaaggctttttctttttgcagaaaatgcacaaatattctgactctttcctagtggaagtgttataatggagtgaagagggttagatggttttggaatgagataagtccaattcatcagcctcaatgccttataagactaattatcgtataagaatgtgttagtgaaaaggtaggtaatattatggaattcaaagtgaaagatggtcaaatcatttattatcgtgatctcggtaaaggctttccaattgtatttttacatggcaataatttgtcaggaaattactttggtaagcaaggaattctgtatcgagactatcgtttaattttcattgatagtcgtaatcacggcaggtccagtcgtcatagtgttaagatgacctttgaacagatggctgccgatttggaggaaattttgcaatatttgaatatcaagaaggccttatttgtcggtcatagtgatggtgccaatttggctatggtttatgctagtcgttatcctgaccggattgcagggctcttgcttaatgcgggaaatatgacctttaatgggttgacgagacgctcaagattcgcggtctatctacagtatctttgcttaaaagccttgtcaccattttcatctaaaatggatatcatggcccaggtaacgggtcttatgcttcatgacttgccactagatagggaacgtctacatcaggctgcctatcctgtttgggtagttatggggcaaagggatgttatcagtattaggcattctagggagatttcggaactctttccaattcataagctctatgtccaacgtcgagaagggcatcgtctagctcaacgtaaatataagattttcaatcaaatgattcgtgagcttgtgagaattagtcgaaaagaggtggtggcatgaagcgtcttttagagagacttcaacctttaaaagcggccgttaaatctatcttctttatctcgattacggttcttgtcgtcatagaattggttcgcctcaaacggaccatcactttagagtcacttgagtcagctctggccggtttgtctatttggcatcttgttttgatggctatcatcggactagtcgctgtctcccctatgctcttttatgacatcatactgaataaggagctagaaacggattattccaaatcctatatcttagaaacaagttgggctgttaataccattaataatttagctggttttgctggtttggtcgatgtgggtctgcgatattccttttattctgaggatgggcaggaaaagacgggtgttaaggcactttctcgtttattgccttactttatgtctggcctatcccttttaagtggtttggtattcgctgtcttttggttcttccctctaagtccggatttaagaaagtattggttactgttactgggtattttcctttatctgccttttattttctttgtttctagtcgtgaaaaattagcctattttggtcaagtaccattgaaaacgaggctaagtcttcttttagcttcgacagctgaatggggaacggcccttggaagctttgtaagtgtagcttatttaatgggcctgcatgttcctctttataatctgattcctctttatttcctagcggttattattggtatcttctctatgattccgggcgggattggtagtttcgatttgattgtgattaccggtctgacctctatgggggttagtaatgctcttgcggttagtctgctcttgctctttcgtttaacttactacgttattcccttcttgttaggtgttgtcttctttttcaaacacatgggagggcgtatcaacgagaaatacttcaaactttcttcacgagtatttggtggaagtctccaccgttttctcgtgtatttgctgcgttttttagggattttcttgattttgtcagccttaatccctgaacgcttggcaaatgtctactttattagcagttttgatcctattcaggaacagttgatttggcaattcccaagtatcctatttggaaccctattcattttcatggctcgtctcatcagacgtcgggttaagggagctttcattgcttccttaataacctttgtcttgaccttgatttatgtcaatctcaatggtatttcttgggctatgtctttcctaattgtactttctttggtgcttatgttgatcatcagaaagaggttgtatcatcgttactttgtttatagttgggaagacaaaaccaaggatttccttttcctagcctttactattctggttcttcttgttctgggtggcagcggtttttggtctcatttattgccacctaagaaccgggatgttcttggacattttgttcatatttggtttgatattttactggcatcagttatcattgcaactattgtttggggagtcttgagaattttggcaccccgtaggtcttttggtcaaagtatggatgatgagcgcttcacagctctccttgagaaatacggaggtgcatcagaaagtgccttggcttatttacatgataaacgcctcttttggtatcgtgttgatggacaagaccaggtagttttccaatttgcacaaaccagcaataagtgtgtggttatgggaaatccaattggtaatgaaaactattaccgagcagcttgggaatctttcttgaagacactatcagattggaatttacaagccttgttttatgaggcagacgagagtattaccctgatgcttcatgattatggctttgattttatgaaatttggggaaaacgccatggttgatttgacgacattctctgtcgatggtaagcatggtaagaagttccgtaaaccaaccaatcgtgtcgaaaaagcaggtttccagtttaagttgcttgatcctccattttcagagactcagatgcaagaaatgaaggctgtctcagatatttggcttaacggtcgtaaggagaagggtttctctcttggtttctttgatgaagcttatctgcagcaggcaccgattgctattgttgagagtgaggatggagaaattgtagcctttgctaatatcatgccaaccaaaaacaaacgggtggcgacgattgaccttatgcgttatgattttgaaaaggcacctgaaggtatcatggattacctctttgtcaaactcttccagtatttccaagcagaaggaaagcagtacttcgatatgggaatggctccactcgcgaatgtgggtactgaagaagatagtttcttggaagagaaggttgccaatttggtctatgtctttgcgcagcgtttttactcttttagtgggctccaacgttataaggaaaagttctctccaatatggtctccaaaatacattgtttatcctaaacgaacttggctcttgtttgatatgattgccattttaaggattgataatcgtaaaattgaagacagattgaagaaaagacgtctttggaaatagatataaaaaatagcgaaaccctagggtttcgctattttgctatgtcatagaattatttctcaaattctgcttttgatttagtatctgcgtattcttcagcaatctcacttgagagaatgtcatcataacttggcaattcaatgtcttggccatatttgttacgaagggcagttgtgaccaaacggtaggcaaggttggcgttacgagaaagaattggtccatggaagtagctaccataaacatttttatagtggaccccttcagtaccatcttccttgttattaccattaccgtagaccactttgccaagtggtttttcatcatcagaaaggaaggtacgcccttggtgattttcaaaaccatagtaagtttcatcaaactcttcgttatggattttgatatcaccaatgtaacggttattttcttgattaagggtgtagtgacccatgacgccgataccatcaatacggacaccgttagcctggatgtaatattgtccaagaagttggaaaccaccacagatggctaggattactttattatcttggatgaattgaccaatggcatcacgtttagatgggagatctttggcaacgatagattgttcgtagtcttgaccacctccaaagaagaccatgtcgtagtggtccttgtcgaagttatctccaactgaaacgatgtcgaaggtcatcttagcaccaagtttttcacccacgtatttgatcataaggacgttaccgttgtcaccgtaggtattgagcagattaccataaagatgggcaacatttaggtcgtaggtgtagtcacgattttctggagatttgagtgaagtataggtcattagttcatctcctttccgacagcatgacgttgagcaagaatatcacggaattcaagcatggcagtataggtcgccaagatataggcatggtcgcaatcttgtttttcaatcaaagccataatatcttcaagtttttctgcttgcgtaatcttatcctctggatagccagtcacacgaaggcggcgagcaatttcagaatggcgaacaccaccagcattaatctcagggatatccatctcgagaatgctttcaaagttggcatcccaaatccagctggtgtcaataccatcagcatagttagcattaagaaggactgacaagctaaatggataatctgcaagtttaatcatgtcaagagcttggctggctcctacgggattcttaattagtacgagggtacatgatttgtcaccaatcttaaaagtttcttggcgtccaaagacagcacggctcttatcaaaaccagctttgatttgctctggagctactccgaagaattcagcgacagaaacagcagcaagggcattgtagatgttataaagaccaccgacattaatcttgtaatcttgtccatcaatgacaaattcagaagtagtgttggtgattttagtcaactctgtcagcttataatctaattctggacggtggaagtcgcagttaaggcacacatagtcacccaagttagcgtaagtattaaggcgatactgaagaatactctcacatttagggcagacaatgccttcagtattatagtgtgccagctctggatcatgcttttcagtgtcaaaaccgtagaaacgcacgggattgactacctctttagaattgaaaagaggactgtctccattagctaaaatagtagcctcaggcgctttagcagcaccatctaaaatcatctgataagtggtatagatttcaccatagcggtccatttggtcacggaaaatatttgtgaagacaaaaagacttggagtgatgtattcagtgatttttggaaggctagcctcgtcaatttccaagacagcgattttcttaccagacttggcttttttagctgttaggaaagtagaagtgattcctgtgatcatgttggccccactaggattggtcacaatctcaccaaaagcttctttaagaatacctactgtcaaagctgttgtcagagtcttaccgttggttccagtgacaacgacaatctcgtagtccttggctaaagtgtctaaaatatctttgtcaaatttaagggcaatttttccaggcagggttgaaccacgtcccaattttgaaaggacgaaatggctagctttacccgccagaattcccatggtagttttcatagtcatgaatttattttatcacaaaaagtagtgattgtagtctcaaaatagttagaattcgtggtataatagaaactgtttaaaaattaaaagaaagtgtgatatgtatgggaatactttcgtccattgatattgatttttggcggtcactctttgatagtccgctgaaagttatcgtcaatagtttggacatattgattgttgcttttttaatttatcgctttattagggccttacgaggaacaaaaattatgacccttgttcaaggggttgtcttatttattttagtcaaactgatttctgattttataggcttcacgacgatttcttatttgatgaatcaggtcatcaactatggagccattgcggcggttgtgatctttgcgccagagcttcgttctgctcttgaaacctttggacgtacgcctcagcattttttgcaaaataaagaggttagctcagacgagaagttggttcaagcctacgttaaagctgttaagtacatgagtcctcgtaagattggggccttggtttctattgaacagacccaaaccttacaagaacagattgctacagggattccacttgatgcggtggtgacgggggaacttttaattaatatttttatccccaatacaccgcttcatgatggggcagttatcatcagagataacaaggttgcgacggcttgttcttatttgccattgacggaatctaataagatttccaaagagtttgggacaaggcatagggctgccattggtctttcagaacagacagatgcgcttacctttgttgtgtcagaggagactggagcgatttccattgcttacaagggaaatttcatccatgatctttctattcaagaatttgaagaagagttgagtcttatcttgttgaaagaacaagaaccacatcagtcattcttccaacgttggattggaggtagcaaaaaatgaagcgtttggtaaatttctttaaaaacgatcgtttatggcagatactagttgcactcttctttgctgtggtactctttttcacagcctggtcggggaactcgcaaaataaaagcaatagttcaagtgcatctaatacctttacacaaaccgttgagtcggtccctgtggatattaaatatgatagtgataagtactttatcagtggttattcctatgatgccgaagtctatttgacggcgacaacacagctggctttaacgactgagacaagtagtgatacacgtcactttaaattagttgctgatttgtcaaatttaggccaaggaaccagtcgagtacctattcaggttaaggatcttccagccggaatgtctgcgcaagtgtcaccatcaaccttgacagcaactattggtaaaaaagctagcaaaacctttgacgtagtagctaacatcacttctgataagttggcaaatggctatgaggttaaaaaggttagcctggataacaccaaggtagaagtgacctcgagtgaagatatcattaatcagattgaccatgttcaagcagtattggaaggtgattccaacctgtctgaagattatgatggtaacttggttcttcaagcagtttcgacaaatggtactgtcctagcaagctctatctcaccagctaaggtacatgcaaagattagtttgagaaaattaagcaaatctgtccctgtcaaggtcgaactgactggagataaggctagcaatgtgtctagtatcagctacagctttaatcgtgggcatgtgactatcgttggtagccaagaagctatggataagattgatagcatcacagtcccagtagacattagtcaagtgactaaggacacttcaaaaaccatagaccttaaggcagaaggtgttacggttcagcctggcactgttaaggttaacttaaaagtcacgcaaaaatagggggagttacattttctcccaaattcatgtataatggatgggattgagagggactaatctcataaaaatgtaaccaattaaaaatgtttaaaatcaggggttgaaaatattggtgaaatcttataaagttagattatctagatagatttcactagattgactcttgctaaacagcatcacagtttaaggaggatttagtgctcaagcactaataataaaattatgggtaaatattttggaacagacggtgttcgtggagaagcaaacgttgaacttacgcctgaattggcctttaaattaggtcgttttggtggttatgtgcttagccaacacgagactggccgtcctaaagtttttgtggcacgtgatacacgtatctctggtgagatgttggaatctgccttagtagcaggtttgctctcagtgggtattgaagtctacaaacttggagtacttgcaacacctggcgtctcatatttggttcgcacagaaaatgcaagtgccggtgttatgatttcagccagccataatccagctcttgataatggtatcaagttctttggtggtgatggctttaaattggatgatgcgcgtgaagcggaaattgaagcccttctcgatgcttcagaagatacacttccacgcccttcagctgaaggacttggaacacttgtggattatccagaaggtcttcgtaaatacgaaaaattcttggtagctacaggtgttgaccttggtggcatgaaggttgccttggatgcggctaatggtgcggctgcggtatctgcacgtaacattttccttgatttaaacgcagaaatcgctgtaattggtgaccaacctgatggccttaacatcaatgctggtgttggttcgacacacccagagcagttgcaagccttggttaaagaaactggctcagctatcggtcttgcctttgatggtgatagtgaccgtctcatcgctgttgatgaaaatggtgatattgttgatggtgacaaggtgatgtacatcatcggtaaacatttgtcacaaaaaggcgagttggctaaaaataccattgtgacaacagttatgtcaaaccttggtttccacaaggcacttgaccgtgaaggcattaacaaggcagtgactgctgttggtgaccgttatgttgtcgaagaaatgcgtaaaaacgactacaacctcggtggtgaacagtctggacacgttattatcatggattacaacacaactggtgatggtcaattgacagcaatccaattgactaaagtcatggttgaaacaggtaagagcttgtctgaattggcttcagaagtgactatctatccacaaaaattggttaatatccgtgtggaaaatagtatgaaagataaggctatggaagttcctgcaattgcggctatcattgaaaaaatggaagctgagatggctggaaatggccgtatcttggttcgtccaagtggtacagaacctctccttcgtgttatggcagaagcaccaacagatgatgaagtgaactattacgttgatacgattgctgatgttgttcgtgcagaaattggattggactaagtatgatagctaaactgagagccttcatggctaccgaagttttcaagtaccttttctttggggttttggcaactttggtctatatggtcagtcgtactttgatttttcagtttacccaacaaggaacactttcagcagtcttagcaaatgcgattgccattatctttgccttttttacaaatgacatgtttgtcttcaatcaggaaaagacaggtatggtcacgcgctttgttaagttcgtgggagcccgcctcttgaccttggtcttagatttggctctggcctatttcttggttgatacctatccagaaattattggtcaatttgttggtcatagtcatgcttgggtaaatggtatcgagagtttattctctcaggtccttatcattgtattgaactacattatttctaaattcttcgtctttacaggcgagaaagtataaacaaaaaggaagttgttaggaaatgtgttaaaaccatttcttaccaacctccttttttgatataattgaagagacttaaaaaaatagaaagatgaaacatgtacgtacaattatctcaacgcctcaaggacgtagcaacctacgttccgaaaggcgcaaaactcttggatgtaggcagtgatcatgcctatcttccgatttatttacttgaaaaaggtttgattacttcagctattgctggtgaagtggtaaaaggcccttatgaatctgctcttgctaatgtctcagcctctggtttccaagataaaatcgatgtgcgcttggctaatggcttggctgccttcgaacctgctgatgaggtaacaactatcacgatttgtggtatgggaggacgtcttattgcggatatcctagatgctggaaaggacaaactaacaggcgtagaccgtctgattttacaaccaaataatcgtgaagatgatctccgtatttggttgatggaaaatggttttgagattattgccgaatccatcatgactgaaaatggcaaatactacgaaatcatggtggcagaagctggacatatgagcctttcagacaaggaagtgcgttttggtcctcatctcatgaaagacctatctcaggttttccagctcaaatggcagagagaaatcaataaactagagattgctttaggctccattcctcttgccaatcagactgaccgtgcagctattgaagataaaattcaaaccattaaggaggttttgaaccatgttagctagtgaacttatcaagacttatgaagaattttgtccacaggagctttccatggaaggtgatgtggttggtttgcagattggtagtctggacaaggaaattcagaaggtcatggttaccttggatgttcgtgaaaatacagtagttgaagctattgaaaaaggtgtggacctcatcattgctaaacatgctccaattttccgtccagttaaggatttggtgtcttcgcctgaccgagatattttgctcgacctggttaagcatgatattgcagtctatgtgagtcatactaatattgatgttgttaatgatggccttaatgattggttctgtgacttacttgacattaaagacaccacatatttaacgcagacttctgaaaatcatggaatcggtcgagtgggtgatatcgtgccacagaccattgaagaacttgctcttaaagtaaaagcagtttttggtttggacagtgttcgcttggttcgttatgaccatgataatcctcttgttagccgtgtggctatttgtgggggtagtggtcaaggattttacaaggatgctttgaaaaagggcgcacaagtctttatcactggtgatgtttactaccatacagggcaagaaatgattactaatggtctcttggctattgaccctgggcaccatattgaagccctctttatttcaaagattgctgagaaactcgaggcttggaaacgtgagcatgattggaatgtgatcatacttgaaagtcagtcctcaaccaatccttttgaccatttgtaggaggatgtgtctgtgacttggcttttacatcaaaatgtggtctttttggccttgcttgctggtctttttacttggggttgcaccattgtcggctcggctattgttttcttcttcaagaatattagtcgtaaattattagatatcatgatgggctttgcggctggagtcatgattgcggcctctttttggtcacttttggatccctctttaacttatgcgactcaaaatggctatgggaaatggtcctggttccctgcggcagctggtttcttgcttggtggtgttgcccttcgtttgattgatgccgtcgttcctcatttgcatttaggaaatgacatctcaaaagcagaagggattcaacctcgtaagaaaaagttgtccaaaacagccctactctttttggctatcaccattcataattttccagagggattagcggttggtgttacctttggtgccctagctggtgggaatatgacacttgcaggtcttatgggagctattggcctagctataggtattggtttgcagaatgtccctgaaggtgcagccctctctattcctattcgggcagatggaaaatctcgtatcaaggccttttattggggctctatgtcagccatcgtggagcctataggggctgttatgggagctgctcttgttatgttgatgatggcgattattccttatgctttggcttttgcggctggtgccatgatctttgtggtaacggaggaattgattcctgaatcacaaaccaatggaaatactgacgtcgccaccttagggctcatggttggctttgttgttatgatggtcatggacgtggccttaggttaaaaatactagagagctgtgcctattgatataggactcagctcttttcaaatagatggagtaaaaaatgaaaattgcaattgttggtgcaggtatcgtcggttcaacggctgactactacttatcaaaagaaaaagacgtagaggttacagtatttgatcatggtcttgggcaagcaactaaggcggcagcagggattatcagcccctggttttccaagcgtcgtaataaagcctggtatcgaatggcccgtttgggagccgatttttaccaagatttagtttcagatcttgaaaatgatggttatgacacgagcttctatgatcagtctggtgtagcccttctcaagaaagatgatagtaagttggacggtttgtatcagcatgcagaaactaggctagaagaatcacccattattggtgaactctctataaaaaatgctgccgacctcccggaatttactggatttgaccgttatctctatgcttctggaggtgccagagtggagggagcagaattgacagcgactttgattgaggcctcaggttttgaaaaggtagagggtctagtcacactatctcctcttgataatggcacttacgagattaatggtcaaacttttgataaggttattctttcttgtggtgcctggctaggtcaaacactcgaacctcttggtttcgaagtagacgttcgcccccaaaaggggcaattgcgtgactatttctttgagggcatggatactggtagattacctgttctgatgccagagggcgaattggatgtcattccttttgctggtggaaagatttcggtaggggccagccatgaaaatgaccaaggctttgatttgacagttgatgagactgtacttgcaagtctggaggaagaggctaagacctatttccctgacttaagtacggctaagtccatctcagaacgtgtgggaacaagagcctacacgagtgatttctcacctttctttggagaagttccagaacttgagggtgtctttgtcgcctcaggtttaggatcttcagggcttacgacggggccactgattggaaaaaatctggttgatttggccatgaaccgacctggtagtttggacagtgcagactatccagtggctcagtacgttaagaaaaaagactaatagtattaaagccctccaatatattgaaatttatgaatcagttagctatttctccttattgagggatgctagctgattctttttttattagagttcctcatatctatttcttatttaattagaagatgataaaatagtaactgttcatcgattgtaggtgaatactaataaaaaaggggagggactatgttccaaaaagttaaagtatatgtgacagtcattgttactttgctatccatcagtttaggcctgtctgtcaaagcaggggcagcagaagacttggctgtaacaaagacaagtattgttctagaaagttatgagtttggaccggctgtaaccaaagttatttttgaatttaatcagaaggtcacaccagaggttgttcacagctcaactcaggttacaacagcgggagttagtcgtcaggtaacgaactcttatgtttctgatgataaggggcacgtggtctattatgacaatagcaagtacgtgacgcttgaattgagcctaccgtcttataaccgctacaacatgggtgggaatgctgaacctatgtattttaacctttctacttggactaaccaatggctggaaagttacatggtatcaatgaaagacttgtcagtagtggcagaggggagtagtcagtcgcagatggtttcatctgagcaagatgccatcaacaatcgtttgatgccaacgacggaggttttcgacgagcgaggacaggtaggtaacatgcagtatgcggcttatagtgcccagaccggtacggggaatagcaccaaaccattgatagtctggttacacggcattggtgagagagggacagacatgaatattccgcttctttcaaatgacgtctatgcgcttactcagcctgatattcaaggccatttcttaacaactggtgatcaggcgcgtggggttaatgttctggctgttcaaacacagacaccttgggggtcagataatgcagcccaactcaaagagaccatcgatatctacctaacttatcaccctgaggtagataagggacgaatctatcttgcgggagtttcaaatggtggtggtatggtcttgaccatgggagcaacctatccagattattttgcagctctcgttccaattgcagcgccattaactgttgaccaatctgggattgataaactgaagaaccagcctatgtggttgattcacacaaaggcagacgcaacagtacaaccagaaaatagtgtcttacctttatataagagcttgattacctctggagctactaacaagtggttctcatactttgaaacagctactgggactgatcttcctggcacagagtatgatggtcattgggcttggatttatttcttccatgaccaggtgattggcgttcagcatcctgaaaatacgaaaaattgggatggttatagtggtatggttgccactgatccaaccaatggaggtggctctcgtgccagtgtcaatggacaaacttataacagtatctttgactggatgagtgcacaacgacactaagaggatgataatcacgctccccaaggggaatattgcgagatattatcttcaatcgaaggggtttcaagtgaaatccttttttgattgcattaagaaaatggacacttgtgattttcttaatgaaagcttaagaacatagggtttaccgtgacaagagggctgaaaaatgctaaaatataggtaatatattagagaaaaaaggagccttcttatgaaaggtattattcttgcaggtggttcagggacgcgtttgtatccattgacacgtgctgcatcaaaacaactgatgccgatttacgataaaccaatgatttactatccactttcaacgcttatgttggctggtattaaggaaatcctcatcatctcaacgccacaggaccttccacgttttgaagagctccttggtgatggttctgagttcggtatttcactttcttatgcagtacaaccaagtccagatggattggctcaagcctttatcattggtgaagacttcattggtgacgatagtgttgcccttgtcctcggggacaacattttccatggcaatggtctttctgccatgcttcaacgtgctgaagctaaggaaaaaggtgccacagtctttggttatcaagttaaggacccagaacgttttggagttgttgagtttgacgacaatatgaatgctatctcaattgaggaaaaacctgagcatccaaaatcaaactttgctgtaactggtctttatttctatgacaatgatgttgtggaaattgccaaaaacatcaagccaagccctcgtggcgaacttgaaatcacggatgttaacaaggcttacttagaacgtggagatctctctgttgagctaatgggacgtggctttgcttggttggatacaggcactcatgaaagcctcttgcaagctgctcaatacattgaaacagttcaacgtttgcaaaatgtccaagtagctaaccttgaagagattgcctatcgcatgggttatatcactaaagaacaggttcttgaattggcacaaccacttaagaaaaacgaatacggacaatatttgctccgtttgattggagaagcataatgactgaacaattttttggtaaagaactagctgcccgcaagattgatgctatcccaggtctgcttgaatttgatattcctgttcatggagataaccgtggatggttcaaggaaaacttccaaaaggaaaagatgttgccacttggttttccagagtcattctttgcagaaggaaaattgcaaaataacgtttctttctcacgtaaaaatgttttgcgtggcttgcatgctgaaccttgggataaatacatctcagtagcagatgaaggaaaggttcttggaacatgggttgaccttcgtgaaggcgaaacgtttgggaatacttatcaaactgttattgatgcctcaaaaggaatctttgttcctcgtggtgttgccaatggtttccaagttttgtctgacaaagtatcctacagctaccttgtgaacgactactgggcacttgaactcaaaccaaaatacgcttttgtcaattacgcagacccaagccttgatatcaagtgggaaaacttggaagaagcagaagtctcagaagcagataaaaaccacccattactcaaagacgttaaacccctaaaagcagaagatttgtaagaatgagtcttgcatagcagtatcgcgactgcaaggagcgttataagatcgttcctgccctagtgggaacaagattccctaagggaatcttgtagggaaatccggagacttaggctccggatttagccatgaaaccaaagggttgctggcgtccctcactagcgaaaggaacgattaaaaaactaaaatttttggagaaaaaatgactgaatataaaaatatcattgtaaccggtggcgcaggtttcatcggttcaaacttcgtacactatgtctacaacaatcatccagacgtacatgtgactgtccttgacaaactcacttacgctggtaaccgtgctaacattgaagaaatccttggtgaccgtgttgaattggttgtcggtgatattgctgatgctgaattggttgataaattgtctgctaaggctgatgctatcgttcactatgcggctgaaagccacaatgataattcattgaacgacccatcaccatttatccacacaaacttcattggtacttacacactcttggaagctgctcgtaaatacgatattcgtttccaccacgtatcaacagacgaagtttatggtgaccttccattgcgtgaagatcttcctggacacggtgaaggtcctggtgaaaaattcacagcagaaacaaaatacaacccatcatcaccatactcatcaactaaggctgcttcagaccttatcgttaaagcatgggtgcgttcatttggtgttaaggcaactatttcaaactgctcaaacaactatggaccttaccaacacatcgaaaaattcattccacgtcaaatcaccaacatcttgtcagggatcaaaccaaaactttatggtgaaggtaaaaatgtccgtgactggattcacactaacgaccactcaactggtgtttgggctatcctcactaaaggccgtatcggtgaaacttacttgattggtgctgatggtgagaagaacaacaaggaagtgcttgagctcatccttgaaaaaatgggtcaaccaaaagacgcttacgaccgtgtcacagaccgtgctggtcacgatttgcgttacgctattgactcaacaaaattgcgtgaagaattgggttgggaaccacaattcacaaactttgaatcaggtttggaagaaacaatcaagtggtacacagatcaccaagactggtggaaagccgaaaaagaagctgttgaagctaactacgctaagacacaagaagtgcttaaataattggaaaatctatcacttccaagctagtgatagatttttctattaagaaatattaggagagatgatgaatagaaaagaatggattgaatattttgaagcgattaataatcgtaagcccactattcaggagtgtcagcaggcccttctaaatggtgaatttgttatggaaggaaaacaagctactttttctaacaatggaaagtctgtgactgaaggagccatgcctttaccaaatcaaatgaatggtcaaatggtcaacccagcttattcacaacaaatggtctttgttaagaagaaaaagtttggcaagaagacttttattggtcttgggattgctttatttcttgttgtagcaacaagtcttggcctctttttgttttcttccaaaggaacaaacttgggtggcttgtgggtaaatggtaataatgctggtttggtttatgagttaagtgggaaaaagtcaaaacttgttgcaggccatagggaagaagaaatcaaagaaatctctattggccagaaagtaagacagaagtttgaaacaagcttagaggacgtcagtgattcaaaactaaaaacgattgctgattttgacaagaaataccaattacagacaaaagagatcatcctggtaaagacgaaagtgtttggatactataatctgattcagaaagatgggacaaacttagttctagatttattcttatcagacctctactacggatcaagaagtaccaaagatttaaaaaagacatgtctttttcataaggcagcggttccaaaagtttttgttgggcaatggaaaaaatttgattccgatgatgattcagaaggagaagggactatctctgaaaatggggttgttactacagattctgatggtaaagatatcttaattgctaagcctttaaaagaatatctggtggatcaatcaggcatcgtagataatggtaaggtacaaaaagagtttgctaaaatacagaagtctcttaagtcacatggttttcaggctaagagtgttaatgacatctaccacgatgcgagcaagtcatactattatgtccttgtagatggtggtaagcgcattattctcttagaggatagctttaaccttctctcttataaaggttatcttgaaagagaagacactcgctaatcacaatatctctatcagataagataagaagtacttaaataatagtcaagagtctatcatttctctgggagtgatgggctttttttacttatagatacgacattaacttatgacagcgacacaaacaattacataaatgttacaaagattacacaaaatacttgatttctgtaacaaaatagatataatagaaatatagaaaagaggtttatgaaaatgaaaagaaaagttattcgtgtttgttcccttgttttgttgtctgtagctgtttctggggctcttgtcggatgtggctctaagtcagaaaaagacactgcagcatcatctacatcttcaacttctaaagtagtgaagccttctgctaaaacaaaaacatctgagaagaagtctgctaaaaaggctaagtcagaagcttcagcttcaaaggattctcaaggtcaagaagaagcgagtgctcctgaagctagctcttcaaaaaatcaagcctcagctggaaatgatgctcaagcagggacaaatagtagtgctgcttctgagtcaaacaagtctagtcaagcaacagctgatacccaaagtgacgctcctgtcccagcagctttggttggcacttggactggtacaagtcctcaagcaacagacattagttttacagttgatgctgatggcaacatcacttcaaaggcaaatttcaatgtcgattacgaaccctatcgtcaaagctcaacaacagcaaaagccgttcaaatttctggtaatctctacgtttgggagggtggcgatttttctaccttgcttcctggtattacaggaatagggggagctggtttccaagctaagcctgggtttattcttgaaaatggaacttacacgccagttcaatttatctctgacttgggaccaacctttgattatagcaactataatgctttcccattctcattaacaaaataaagtaaagaagctatctggagagatggcttcttttttggctcaaactcttatcattcgaggtctcatttctgcttaaaaaatggtagaatagttacatgcaaacaaaaccaacgtcagcctatgtgcacattccattttgcacacaaatttgttattattgtgacttttctaaggtctttattaaaaatcagcccgttgatgactacctacgggctttgattcgtgagtgggagcttttagatatcaaggagcttcgcaccctttatattggtggtgggacaccgacagctatttctgcggagcaattggactaccttttaagcaatcttcagaaaaacttggatttgtctaagttggaggagtttaccattgaagccaatcctggtgatttgacggttgataagattgaggtactcaaaaaatcagctgttaatcgtgtctctttaggggttcagacctttgatgacaagcacttgcgtcaaattggtcgcagtcacaatcaagcacagatttatgaaagtattgatagcttaaaggctgctggttttcataatatttctattgacctcatttatgcactacctggtcaaaccatggatcaggtcaaggaaaatgtgagaaaggcactggaactggatattccacacctaagtctctatagtttgatattggaacatcacacggtctttatgaataagatgcgtcggggtaagctcaatctgccaactgaagatttggaagcagagatgtttgactatattatccaagagttggaaaagaatggttttgagcactacgagatttcaaactttaccaaacctgggatggagagtcgtcacaatctcatgtattggaataatgatgagtattatggtgtgggtgctggagcctctggttatgtcaatggtgttcgttatcgcaatagaggccctatccagcattacctaaaggctatagctgaggatggtcatgctagacttcacgaagaacatctgactaaggcggagatgatggaagaggagttcttccttggtttgcgtaaaaagtcgggtgtgtctattaaacgttttgaagagaagtttggcttgtcattcgcggatacttatggagacattgtgaaaaaattacaggaagatgggctcttggtcaaggatccagaagtggttcgtatgaccaaacgaggactctttttgggtgatagtgtcgctgagcaatttatcttggaggattagatgggattaaaatttagtattccttatcaaattccgttttatgagacggatatcacgcatcaggtaaaattaccgcacttattggcgttttcattgcaagtatctggtatgcagtcagaatctctgggaaatacggataaggacgtttttgataaatacggtctgatttggattgtgacagactatgcgattgagattgaccgtttacctcgctacaatgaaaaggtgatcattacaacggaagctatttcctataataagattttctgttaccgtaatttttacatcacagatgaaactggtcagcaaattatgctctttaagactacttttgcccttatggattatgaaacgcgtaaggtagcagaggtgccagatgaggtggtagcaccttacggagcagataagactaaaaagttgcttagagggcctcgttataaggctttggaaaatccaattgagacgctttatcgtgtgcgttattttgacctagatatgaatggccacgttaataatagcaagtacttggagtggatgttggatgttttcgatttggactttttgaccaagtacacaccagcccatattgacctcaagtatgttaaggaaattcatcatgggtcagagatttattcaggctatgagtttgaccaagaaagtttgagcagtcaacatcagatttgtgttgatggcaatattcatgctcaggccattatccaatggaaagaaataggagacgagtaggatgacatataaaggttatttgattgatttagatgggactatttacaagggcaaggatcgtattcctgagggagaagtcttcgttaaggagttacagaagcgtcagattccctatctttttgtgactaataatagtatgcgtacaccagagatggtgcaagagcttttgcgtaatcagtgtgagttggaaacgccccttgagaccatctatacagctactttggcgacagttgactacatgaacgatatgaatcgtggcaagacggtttatgttatcggtgagactgggcttaaatctgccattgcggaagcgggatatacggtagatgaggaaaatcctgcctatgttgtggtgggcttggaccgtgaagtcacttatgaaatgttggttaaagcaacgcttgccatccacaaaggggctatatttattggaactaacccagatttgaatatcccaacagaacgcggccttcttccaggtgctggttccctcttagctcttatcgaggcggctacccgtgtgaaaccaatcattattggtaagcctaaagctattatcatgaacaaggctcttgaaatccttgggacagaacgtagccaaactatcgtggttggtgacaattacttgactgatattacagctggtattaaaaatgactttccaacacttcttgtgacaactggatttaccaaggcggaagaggttgcgaatttaccagtaaaaccagaccatgtgctttctagtctagcggagtgggattttgatgcgaactaagattgaggctgttctgactccgatttggctcttggccctgtctatcctagtgacgatttatctgtcatggggcttttattattttgatattgattggatgcatcttttggactatgtcattcttggcaagacagagctctggcataatttcaatgtcctcatgcagtacctgacctttccttgggttggtcatctatccatgcctgattttccatcgtcggagagtgggctcaagcatttccatgatgtgaagtggctctttcatttggtacaggggcttgttattctactagcttatccagcagtaacctctctttggcgaaatgtgaagaaagggacctttggtctttacattaaactttatatgagtctggcactcttgccggtccttattggggttgtggggctttttctcggatttgatgagttttttacgctctttcatgaagccctctttcctggggatagcagttggctctttaatcccatgttggacccgattatcaacgttttgccagaagagtatttccttcagtgttttgtcattttctttcttgtctatgagggaatcatggtgagtttgacttggttggcccgtaagcaacttaaaatgtatttgaaaaataaggagtagttatgtctattcgtgataaccatttgcatacccatcattcttatgattcggatgcgaactttactgactatttgacgcattttgatggggagattgtaacgactgagcattatgatctctctaatccttataccaaacaggatgatgtgcccgagtacgaggcctatagtcgtgagattgaaagtcttaaccgtaagtatggcaatcgtataaaacgtggtatcgagattggttattaccagcctagggagagggatattttagactttctggatggtaaggactatgatctcaaacttttatctgttcaccataatggggtcaatgattatcttgatgatgaggtagctgatatggataaggcaagcattattcaagaatatctggacaagttggagtacgctattggtcgtgtggacgcagatgttttggcccattttgactatggtttccgactgtttgacgtgactgttgatgagttaaaagcttatgaagaacagctcaaacgtattttccagaaaatgattgctaatgatttggcttttgagctgaatgcaaagagtatgtatctctatcatcatgaagacctctaccgttatgccctaggccttgttaaggatttgggatgtcgcaagtattctattggctctgatggtcataaattagagcatttccgtctgaactttgacaagattcaggaaatcttgagagaatttgacattacagaagatatgattatatagcaaagacagcttcaactgaagctgtctttttcttaaggaaagcttaaagaaaaggcgttgttgtgggaattatagaagattttaagctttgcttgttatgctaatgtcaagcaaaaggaacttatggtttctatcttatctttcaaaattggaggttttctatgaaatttctcaaaaggcatgcctatgccttactctttaccctttttctgatgggggcaaatgtctactctctcttaaaggtctttgtcattccctcagcagtctcaacggtttcagccaatacgactagctcaagcacatcttcgtcgacagcatctactagcactggtaaggtgactaagacggatacaacttacaaagatgacaatatggatatcaaaatcacgacgggtaaaaccagtgatactacatactatgtggcagatatccagctgtcaagtgctgattaccttaaaacagctttggcacaaaacacctatggcaccaatattactgacaccacttcaagtattgcccagcaaaacaatgctatctttgccataaacggtgactattatggggctaatcagtcaggttatgtgattaagaatggtcaagtctatcgtgatactgatcgaaacagtgattacgaggaccttgccgtttactcagatggtagcttcaagacctttaaggaaagcgatacaacggctcaaaaattggttgattcaggtgtggtgaatacctttgcctttggtccaaccttggttgaaaatggcaagatatctgtatcagaaaatgaagaggttggtcaagccatggctgacaatccacgtacagccatcggagttatcgaagagagtgacggcagtgtgcactatattgtcattgtctctgatggtcgtaccagtgagtcgtcaggattgactctttatgaaatggcagagttgatgaaatcttatggcgtgacgacagcctataaccttgacggtggtggctcatctaccatgtacttcaatggtcaagtcattaacaagccaaccacaaatggaaataaaatctcagaaagggcggtgagcgatattgtttacatcggttactaagaaatcagctagcaagcactttttcacctacattggtttaactatttttagcctagtctttacctttatttatgaacgcttttcttatggggaatcatccatgtttatgcgcatgatgttcttcgcaccattggccggagctttgatttatctgctaacaggaatggggatgtcttgggtgaaaacacgtctttcaaaacttctttttaattcgtctattgccgttgttgctagtgcctgcttggttaagggaatcgttgaggtttcaggtcgtacgactagcgtggatatgccttattggtatgttgctgcggggctgctttgtttgagtattatgacaggatttatcagacctagaaaattggcataaaataagagcttggagctgtgcttcaggctttttgtcttgcattgaaaaattatttaggataaatatacaaaacataataggaagaaattatttaaaactgggaatttgcctaaagaaattttcataaaaaaactgagactgatttttttgtgataggaatttagatagaacgagactgtctgtagtgatggaaatacctgaatttatcgtgtttccggcgctaggaacttttgagacatgaggttcaaaacttagtcatggaacttcttagattggtaaaatcagccagagaataatttcatcaacagccgtcatcacctaagaaaagtcttaaaagtcttgtttctgctattaaatatacataattttcaactttttataaaaatatacaaaaaagacttgctttgttctgaatttttaggtaaaataaactaaaatcgaaatcgttgatagaaaaagtcagatcgtttcacagagaatgcgggaagctgagaacgcatgagatcaaagacgacacattcttgagagcgtatgcgaactctggatgacagtagtgtacgacgggtggttccgttagagactaggagttacaagagagaacttgtgacttcatgaggaagagggggtgacccctgttcgaattaaggtggaaccacgtgccaacgtccttgcaaaagttgtttttgcgagggcgttttttgttacacttacttttagcatttgtagctagccgtacacttggttggagttgaacagaaaggataaactatggaaatcaaaggattacgaaagattgaaccctatgtggcaggtagtcagcctgctgagaaaaatatcattaagttgaatactaatgaaaatgcctatggaccaagtccagcggtccatcaagctttagcatcctttgatgcccatcagttacgcaagtattcgactttggatcaagcgactttgcgtcaagccttatctgaacagttaggtgttcctgccgatcaagtgattattggaaatgggtcagacgatatcttgtcaatggcttttctagctttctttaatagcgaggaagaagtcttgtttccagatttgacctatggtttttacaaggtatgggcagatttgtatcgcatcccatttagagaagtgcccttgaactcttcatttgagattgataatcaagattacctggttgaaaatggtgggattgtccttactaacccaaatgcgccaacaggtatttataaaactctcgatcaaattgaagaaatcgtaaagggcaatcagtcagtagttgtgattattgacgaagcctatattaactttggtggggagactgccttaccgctcctagaaaagtatgacaatgtgtttatcacaaggaccttttctaaggatgcctcacttgcaggcttgcgtgttggctatggcatcggaagtccaaagctgatggctgtgatcaatgccgtcaagaattcagtcaatccctataatgtggatagcattgcagaagttttggcgactgcagccgttaagtcttgggattattatgaggatagctgcgctaagattatggccacacgtgactggtttagtaaagaattgaaagctattggctttgatgtgcttccttcaaaaaccaattttgttttggttaaaccgcacggagtgacagcaggccaattgtttgactatctccaaagtaagaaaatttatgtccgttattttccaaaagtggagcgtatttcagacagactacgcatttctattggaactcaggatgagatggagcgcgtactaatgacaatacaggagttacaagcatgaaaaaaacgacattatccttaggaatgcacgataaacttttcaaacgtgcccgtaccatgtatcagattgagcatcgtatctgtgacttgttgatgacaaagggctttcttcgaattgagacaccaaccttggagcattttgaagtctttagcgatgttgtggacaatggtaactacaatttctttgataaaaatggagatcttgttagtttacgtcctgatattaccagccaaattgggcgcgtgattgcttcgacgcaagttcatacaccgattaaattttcttactctggaaaagtctttaactacaatgaggagatgcgtggcctatccaatgagcatacgcaggctggtattgagatcataggattccccgttcaccaggccatggaagaagctgtgatatctgctaaagaggctctggatgctgccggtgtcaaaaattacaagtttgagttttcacatgctcgcctcttgcaactcatttttgaagaattagaccttccagctgtaaaagaagcagagttggccgcctatatccgtgacaaatcaatcacaggcctcaaggaattcaccaaagaaaatccaagtcaatatgacaaggtcttggaacagttgcccttcctctttggtgagaccaaggctgttttgaccaaggctagagaattgacagacagtgaagcttttttgacagccttggatagtttggaagtcttaactaatcgcctagcagatagtctcccagagacgacgcttgatttggctcaattgccagcagtgccttactacacaggcatgatgtttaaggtctttggtgataaggtgccagatgcctttgtatctggtggccgttacgataaactgtttgaacgctttggtgctaccgagttaacagcggttggttgggcgattgatgtcgattcggtctatcaagcagtgcatgatgatgtggaatttggaggtgacttggatgactagcaatcaaatcacaattgccttgaccaagggacgtattgagaaagatacggttaaattactagaaaaagctggctttgacatgtctttcatggctgataagggccgtaatttgattttcgaaagtcctgacaaacgtttccgttttctcctagtcaaagctccagatgtgaccacctatgttagacacggtgtcgcagatattgggattgttgggaaggatgttttggttgaacatccgacaggctatttggaaatgttagaccttaattttggcctttgtaaattctccgtagcatcaacagaagactataaccctgatgaccataagcgtaaacgtatcgccaccaagtatccaaccattgcgacggactattttaatcaaaagggtgaggatgttgagattatttcaattcaggggagtgttgagattgccccggtcattggtctagcggatgccattgtcgatattgtggaaacagggaatacccttgttgctaatggcttaaaagtttatgaagatatttgcaggatttcagcacgaatgattgttaataaggcttctttgaaaaataacaaggaagttctaccattcatttgtaagattgaatcacttgtagggaacgaggaggtaccgttcgaatgaaacgattaactggaacaaataaagaaattgcagagcttctttatcaggagcaattggaactgtcaaaagaaaatagagacgttgaaagcacggttcaagccattattgaagacgttaaaaaacgtggagacgaggcccttcgtgactattcagctaaatttgataaggttgacttgactgattttgaagttggacaggacttgattgatcaagcctttaaagagattgatccagaggtttaccaagccctagttaatgctaaagaaaacattgaatcttatcacaaacatcagttggaggctggttttgaggaccaaccaagtgagggtgttattcgtggtcaattgattcgtcccatcaatcgtgtgggtgtttatgtgcctggaggaactgcggcttatccgtcatcagttcttatgaatgttattcctgccaaaattgctggggttaaagagattattatgattacgccgcctcaagagcactttgttcctgcgattctggtagccgccaaattggctggtgtggatagcatttaccaagtcggtggggctcaaggggttgcggccttggcttttggtacagaaacgattccaaaggtggacaagattacaggtcccggaaatatttttgtggcgactgccaaaaaacaggtttacggtattgtcggtattgatatgattgcagggccatcagaaattggtgtcattgctgatagtagcgccaatccaacatacgtggcagccgacctcttgtctcaagcagagcacgacacacgcgcacgcgccattttggtaaccgattctgaagccttggctgatgcggttgaaaatgagatcgaacgtcaactcaagcttttgccacgtgaggcgattgctcgtccatctgtcgaaaataacggccgtattattattgccaatgatacagatgccatgttcgaactcatgaacttggttgcgccagaacatttggaaattgctatggacaatgcttatgattacttggaaaaagtggaaaatgctggttccgtctttcttggtcactttactagcgaaccaattggcgactactatgcaggtgccaaccacgttcttccaacgacagcgactagccgcttttcatcagctttaggcgtacacgattttgtcaaacgtatccaatatacacaatacgataagtcagcagtcaataaggctcagcacgatatcacaaccttggcttatgcggaaggtttgcaggcccacgccaaggcaattgaagtcagaaacgacaataattgagagagtagaggaagaagttatgagacaagcagaaattgaacgtaatacctttgaaaccaaaataaagttaagcctcaatttggatgctcaagaaccagtagatattcaaacaggtgtcggattttttgaccacatgttaaccttgtttgcccgtcacggtcgtatgtctttggtggttaaggctgatggcgacctttgggttgatagtcaccacactgttgaagatgtcggtattgtccttggtcaagctcttaaagaggccttgggcgataaagcagggatcaaccgttatggaacggcttttgtacctatggatgaaacccttggaatggcaagtttagacttgtctggacgtagcttcttggtctttgatgctagttttgataatccaaaattgggtaattttgacacagaactggtagaagaatttttccaagccttggccttcaatgttcagatgaatctccacctcaagattctccacggaaaaaataatcaccacaagtcagaaagtcttttcaaggcaacaggacgtgccttgcgtgaagccatcacaatcaatcctgacattcacggcgtaaactcgacaaaggggatgctatgattatcgtcattgattacgatgcggggaatactgcaaatgttctgcgtgcccttgaaaaaatcggagtgactgcagaattgtctgccgataaagaaaaaattctagctgcagatgggttgattttacctggtgtaggtgcttatccaacggctatggcagagttggagagaagaggtttggtagctgttatcaaagaggcagtcgcacagggagttccccttttaggaatttgtttaggcatgcagattttaacagaaaaaggactggaacatgaagaaacagatggtcttggctttattccaggtgtctgccgtcctattccagccagcaaggagcaacctgtcccacatatggggtggaatgatttggctgttaagcaagccagccctttgacagatggtttagatggccaagctgtctacttcgttcacagctatttcacagatgtccctagccaatacattgatgttaccgcagattatagtattgaggtaccagccatgattcataaagacaatgtttatggtgcccaatttcatcctgaaaaatcaggcgatattggcttgggtattattgaagagtttgtaggtttatgtaaagcctagaagctagtgagagcaaagactttttagttagaaaggatggtaggggagatgcaaattctaccagcaattgatattaaggatggacaggctgttcgtctctttaaaggagatttcaaccaacaaactgttgtcaatccagatgttattgagcaggcaaagacctttaaggatgcgggcattcaatttattcatgtcgtcgatttggacggtgcccttgatggtcgtgccactaaccgtgacttgattgcagaggtcaagaaggtttctggacttggcatcgaagttggtggcggtatccgtaccttggagcagattcgtgactatttggcagttggcatcgaccgtatcattatcggttcaatggccgttaaaaatcctgacttcgttcgagcagctttagaggaatttggtgccgataaaattgtcgtaggtattgatgccaaggcagggtttgtcgctaccgaaggttggttggaaacaagcaatgtagactacatcaccttggccaaggaaatggaaaagatgggcgtaaccctctttgtctatacagatgttgatcgagatggcacactgacaggacccaatcttgatcactacaaacgtttggtatctgaactcacgaccgccaaagtcattgcttcaggtgggattgcagaagtagctgacttagatcacctagaagagattggtgtggcaggaaccattgttggcaaagcctactataacggcaatatcacattagaccaactcaagtctttcggaggttaatatgcttaaaaaacgtattattccttgtttggatgtcaaggatggccgtgtcgtcaagggggtcaattttgtgaatctgacagatgttggaaatcctgttgattctgcgcgtgcttactatgaggctggttgtgacgaacttgttttcttggacatcacagctacttcagataatcgtgaaacaacggttgacatggtgcgtcgtgttgccgatcaggtctttatccctttcacggttgggggtggtatccgttcagttgaagacatgaacaagatgctcaaagccggtgctgacaaggttgccgtcaattcctcagcccttgccaatccacaactaatcgctgattgtgctcaaaaatttgggaatcagtgtgtagtggctgcgattgatgccaaaaagatggctgatgggagctggcatgtctttgtggcgggaggccgtaaggatacaggtagagacctcatccaatgggctcaagaagtcgtcgccttgggggctggagaaattctcttaaccagcatggacaaggacggcactaagtctggttttgatttggaaatgctcaatcgtgtagcggaagtcgtcgatgttccgatcattgcctctggtggtgcaggaaatattgaggacattgtagaggtctttgaaaagacaacagcaacgggtgctctggcagcctctatcttccactttggtgaggtgaatataggcgaaaccaaacaagtcttggcaaatgcaggaatagaggtgagacgatgacagaggttaaacttgattttgacaaacaaggcggactggtaccagttattgtgacagattacaagacggggcaggtgctcatgttggcctatatgaatgagctgtcctatcagttgacccttgagaccaaacaaatgcattactggagccgttctagaaatgaactttggcataagggagccacatctggtcatttccaacatgtcaaaagcatcaagacagattgtgatcaggacaccttgcttatcgctgtggaacaagaaggagcagcctgccatacaggagcctacagctgtttctttacggatatatatgatgacaatcaagataaataggagtagctatgttagaaacactttataaggaagccttagatcgtaaaaaaaatcccaaagaaggatcttataccaattacctttttgacaaggggctagacaagattcttaaaaaggttggcgaagaagcaacagaagttgtgatcggagccaaaaatgctgataaagaagaaattgccaacgagacagcagacgtcctctaccacctagcagtcatgctcgttgaaacaggggttagccctgaagacgttgaagccgtacttaaagcccgtcaaggcaaacaaagcaatgtccatgaccgaaaggaagtaacagattattaaggattatctcaaccgattgagactaaaacgaaaagcctgaagtgattcaggcttttttggtagagaaatcctaatcttctgccttctaaccagcataagaaagcgctttaaatgttataataggagtgaagaaagctcgttttatttgaaggatttggtgtgcttatttatacaaatcattgaggaaaggaaggatgtcctatgaagaaaaatactcctaatattttaaagctttcttgcttagctattctcctcctctgttctattcttttagttcgttgcacagtgttacttccaattacttactcaaaagccagggaaaaaacgcaaaaaaatcttggctcataatggttttaaaggaaaggtcgaagttaagtgtatcaaaaaggtgattctagatagtgcaagcatttatgtcttttatacctattcagaggaaacctacgataatcaaaccatatcattagatgataaaattacatttcaactggactggacagttgttcgtgaagaatataagactcctggtctttactcgcaaacctatttacaacaaaaatctgtaaaaaaagaagagcaaaaactctttaaagagcttaaaaagcaatctttaggctttgatatcgaagatttctctttcaaagataatacactgatagatcaagaggctggtaatcgtcgaaaacatttagctgaagaaaaccgtaaaaatggcaagcatgatttttatgggtattatcaaattccttatcaaacaatgattgatgaacatattgttactatgtcaataagagtaagtgatacagaaaataccagtaagaaagatttagaagaggcagcgaagaaactggatgctagcaagctaccagacggagagtacgaattttattttttcacaactgataaagaaaattccgcttactatgacaattccggatatattggctatacctttaacatacaagatggtaaggttgtctaagatgaagatgattagaaagtattttgattttcatcgataagctagactgccatactaggccgttaaaagtggggttacagctaagtgaaaacactaacctcaaaacatgcaaaaacatctccgtaaattagacggagatgtctttttgtcttacaaattctttttcttcttagcttttttggttagggcaaggtcacaattttcaatgtttgagattaggtgtttagttaattggaagtcatccacttggggattcaaatccacttcgtagactagttgcatgctctcacccccacctgtggtgttaagggaaattaggtcgcattcactggtgaaattgagcaaggctttagtaattttttgatcaatcaagtcttggtaggagacgttaatggtcaggagtctacgacgttggttgtcggtacgactttgacgattttccaaaaggagccaaacagccaatagaaaggcggtgaagaggacggccagtagcaaatagcctgtcccagatgccagaccgataatcatggccatgaagacggcgattagctccctggaaccactagtcgctgatcgaaaacgaatcagactaaaggtccctgccacggcgatagaggtccccaaactaccattgacaaggaagataactagggtcatcaaacatggaagtagggtcaaactaatgacaaattctctggtgtagagggttcggtatttgtaagtccaggttagggccaatcctaaaacaagactgaccagtaaggccagcatgagttgaaggggactagcagttgcggtcgcatcattaaagatagaattgaagagattagacataggcagcacctcctttttcttgaactggatgtggcccgtagtctagaccttgtgacttatgataggcgcagctgtattttgagaatttctgttcttccaaaccatgtttgtctaagatagcttgaagccagtctggcttctggccaggtgccttgatttccataattatcatatcttcatcaagaaggggaaatccatgatttcccttaaagaaactgacgtcttcatcacggtaagtcaaattttggtcaagggtaacacgaactttattgtaggcatagccttggatagtctctttttctttcattgaaaaacggtcgtagtagatatacatacgaggtttgagtccctcattatagcgctggcgtaactgttgaatatcttgcaagagctggcggtcagtgatttgaccatgattcttaccgtctgtcatcaagttagtgatggcaagtggagttgaaacgagacgaaacttatgtccaattccctcatcatctttggctttaacctctaaaaagaccttactatcaattttgggattggctaggtaggtacgcatgcggattttctcttgacggtgattaccatctagggcatcttggatgacgtcaaaattatccgtatcaaagtaaatatttgaaatggtagatgtcggataatcatcctctaccaaatactccttaagatcagtgagcaggtcctcaagattttcctttgagaccacatattttgtttcaatacgtttaaaacgtgtttccaattgtttaaccatgaaaaaactccttttttagataagatacaaagccgtaaagcaactcccaggaaaatagggggaccagtcgaaggagtttatctccaagcagggcccatctttttcccccgagttgtaggcgtgttcaattagataagatacaaagccgtgaagcaactcctatgaaaataggaatctgttgcaggaacatctattcccaaacagtcgacttattgttttaattcttttttatagtagaaaagttgagcgaaaatgtactatttctatatagcacttactagctcgcctattagtctatgggacttttctgaaagttttcctaagctaaactttcaccaaacttaacttaagataagttttagttaacctttagaattgttttaggtaagtcccgtaaactgtaatcatccaaacgaacccgagaggaaaaaatatgaaatcaaaaaaactaaaaaaatggacgactttattgacctgtgcgactgctctaacagtcatgacagcttgtagccaatcaagcagtcagttaactgggacgacgtcaagcactacatcaaaaacaagtgctgtaacagcaacgaccagtaagaaaacaaataagatcaacagcaactattttacttctaaagattctgatacctcttataatgaaagctcagctactaagattaagttatcaggctcatctgcggttgtttcaggtgatggtgcagccctatcaggttcaactgtaaccatctccaaagctggtacctacgtcatttcaggaaaatccgatggtgtgcaaatcaaggtagacgctggtgattcagatgatgtccatattgttttggatggtgctaccatgacaaatacaaatgcagcaatcaacgccacaaaagctggtcatgtctatctgacacttaaagatggcactacaaacacactttctgattcaagttctaatagtgatgaagatgcggatgctgtgattttctctaaaggagatttgaccattaatggttcaggtactctaaacattgatgccaagaaaaacaacggtattaaagccaatgacagccttcatatgactggcggtacctataagatttcctcagtcggtgatgccttcaatgtcaatgatgaactcaatatcacaggaacaactatgactattgaggctgaagaagatgctgttaaggttgataatgatgacgacacctcagtaggtaccatgtatctgtctgacaataccatgaccattaaggctggtgacgacggtattcatgcgtctggggacctgattattgatagtggtacttacaaggttgaaaaatcaactgaaggtatcgaaggtaaatctgtgaccatcaatgacggagacatcgatgtctatgcgacggatgatggtgttaatgcggccaatgctaatgccagtcaaagtgagattttcttcaagatgactggtggaaccctaaatgttgaggttggccagggcgatacagacccaattgattctaacggcgatatttttgtatcgggtggaacaatcaatttgactggtcagtctggctttgactttgatggttcagcgacctataccggtggtgacattactatcaatggtgagaaacaaactaagattgaaaactcaatgcctggcggcggtggtccccaaggtggtgggcaaccaggtggctttggaggaggtcactaaagagtcataggatgaaacagaaaggaagtgcctatgtatattattattccagcttatgaaccagacaaacgcctgattcaggtggttcaagatattaccataaaactccctaaagcccgtattattgttgttaatgatgggagtggcccaggctataacgactattacgacgaaacggcttttattggagcgactgtccttacccatcctgtcaataaaggaaaaggagctgctctcaaaactgcctttgctcacattcaagaagaagtagtcagtcagcacctttcggctcaacctattgtcacagttgacagtgacggtcaacatctgattaaagatattgtccgtgtggccaaggcaatcgaggaaaatccaagtcatcttgtcttgggtgcgcgtgcctttgttggtaaggtgccagcgcgtagccgctttgggaataaggtgactgctggacttttccgtctagtaactggtcagaaagtcacagatactcagacggggcttcgaggcatgtcaaccgacctgattccatggcttcttaatctggatggcaatcgtttcgagtacgagtttaatatgttgcttgaagccaaaaagtcaggccatcaaatctctgaagtccctattgagaccgtttatctggaggtaaataaaagttcgcactttcgccctattcgtgattccatccgtatttacagcccttttttaaagttctctggcacggccgttttggcctcagtcattgatgcaacagccttattcgtgctctttgccttgacgaaaaatctgctcctttcggtcgtgctagctcgtgtgatttcggcttccagccagtgtttgctgaacaccaatgtggtctttaatccgacaagctccctctttagatcgagtgttcgttactttatgttggtcctggtcctcctggcctgtaactatttcttacttagtagtctagttgctattggtttaggcttggttctggcaaaactagttacagaaaccttgctctttttagttagctacagggtccaacataatgtggtttttgcttaatagctgacttgaaaatcgctaactgattgaatagagatagcttatttacctctcaattacctctaaaaattttcctaaaaatatagaaaaaactaccgttttcgacattcggtagtttttaatatttatcgaaatgttgttcaatttacattatgattaaaaagttaaaagggctgataaagtttccaaatgctaaaaaaaaatatgctataatgaaattgtttgaattatgtagatttttattcaaacgaggaaaatgaaatgaggaccgaaaatgggaaaaaaggtacattataagcttcacaaagttaagaagcagtgggtgacgattgccgtcacttcggcagcacttgcctctatcgtaggtggtgctacagtagctaatcaaaaggtttcagccgatgaaacaacgaaaccagttgcctctacgacagctgaaagcgatgttgtcgtcgaaacgcatgaagtagccgctcctgcagcaactgctacgacagatgcgacagcaacaacaactgacaaggctgctgatactgcaacagtcgaaactcctgcggcagtaaccactgcagcagatacaagtgctaatacggtggcaccagcaacaactgatcgtgcagcagtagcaaatggtgcaacaacagaagcaccagctgcaactgcgactgcgacagatacaacgcttacagtagctgaaaaaccaaaatctggcgttactgaaaaagaagaaacagcagcactctctttggacaacatcaaacaagttgatggtaaatactattatgtcaaagaagatggttcatacaaaacaaactttgctgtttcagttaatggccagttgctttactttggtaaagatggtgctttgacaagcacatcaacacactcgttcacaccaggtacaactaatctagttgatgctttctcttcacataatcgtgcttacgattctaagaaagaaagcttcgagttggtagatggatacttgacaccaaacagctggtaccgtccagtcaccattttggaaaatggtgaaaaatggcgtgtatcaactgagaaagactttcgtccacttttgatggcatggtggcctgatgtagatacacaagttgcctacctcaatactttctctaaacactttaaccttaacgcaacttattcaaccagccaaagtcaatctgaattgaatgcagctgctaagacaattcaaattaagattgaacaagaaatttcagctaaaaaatcaactgaatggcttcgtcaagcaattgagtcttttgtaaaagaacaagaccagtggaatactacaactgaaaactatacccttgctgaccaccttcaagggggagctcttctttatgtcaataatgacaagaccccttgggcaaattctgattaccgtttgcttaaccgtacaccaagtaaccaagatggttctctaaatggtacaggaagatacttgggtggttatgaattcctacttgccaatgacgttgataactcaaatccagttgtgcaagctgagcagttgaaccaaattcactatcttgtgaactggggatcaattgttatgggtgataaggatgctaactttgatggtatccgtgttgatgcagttgacaatgtcgatgctgaccttctccaagtttatacaaactacttccgagcagcctttggtgtggataaatctgaagccaatgcactcgctcacatttctatccttgaagcttgggatttaaatgataatgcttataatcaaaaacatgatggtgcagcccttgccatggataataaccttcgttatgcaattatgggtgcactttatggatcgggctcttcattgaaagatttgattactagcagtttgacagaccgtacaaataatagtaagtatggagatacacaagctaactatatctttgcacgtgctcatgataaccttgttcaagatatcattcgtgatattgttcaaaaagagatcaatccaaaatcagatggttataccatgactgatgctgaattgaaacgtgcctttgaaatctataatgaagatatgaagaaggcagaaaaacgttatactattaacaatattccagctgcctatgctttgattcttcaaaatatggagcaggtaactcgtgtttattatggagatctctatacggataacggccaatatatggctaccaagtctccttactacgatgctatcacaacgctcttgaagaaccgtatgaaatatgtttcaggtggacaatcgatgaaagtcgacacgttcaatggaaaagaaatcttgtcatctgttcgttacggtaaagatattatgactgctgaccaaactacgggtgtagcagaaacaagtaaacattctggtatgttgacacttattgccaataatcaggatttctcactgggtgatggtactttgaaagttaacatgggtaaacttcatgctaaccaagcctaccgtccattacttcttggtactgataagggaattgtcacttacgaaaatgatgcggcagcagctggaaaaattaaatacactgatgctgaagggaacttgactttcagtggagatgaaatcaaggggtatcgaactgttgatatgagaggttatcttggtgtttgggtaccagtaggtgcacctgataaccaagatatccgtgttaaaggttcagataagaaacttgacaagacattttctgctactgaagcattggactcacaagttatctatgaaggtttctcaaacttccaagattttgttgaaaaagatagccaatatactaataaattgattgcagaaaatgcagaactcttcaagtcatggggaatcacatcattcgagatggctcctcaatttgtatcggctgatgaccgtaccttccttgattctgttatccaaaatggttatgcctttactgaccgatatgaccttgccatgagcaagaataacaaatacggttctaaagaagatcttcgtgatgcacttaaagcccttcacaagcaaggtattcaagcaattgctgactgggtaccagatcaactttaccaattgccaggacaagaagttgtaacagcaacacgtgctaatagttatggtactccaaaggccaatgcttatatcaataacactttatatgttgcaaattctaaatcatcaggtaaggacttccaagctcaatatggtggtgagttccttgatgagctccaaaagaaatatccacagttgtttgaagatgtgatgatatcaactggtaagaagattgatccatctgttaaaatcaagcaatggtctgctaagtacatgaatggtactaatatccttggtcgtggtagtcgttatgttctcagcaacgatgctactggtcgctactatcaagttactgataatggtatcttcttgccaaaacctttgacagatcaaggtggtaagacaggtttctactatgatggtaagggtatggcctactttgataatagtggtttccaagctaagaatgccttcattaaatatgctggaaattactattacttcgataaagaaggttatatgttaactggtcgtcaagatatcgatggtaagacttatttcttcttgccaaacggtatccagcttcgtgattctatttatcaacaggatggtaaatattattactttggtagctttggtgagcagtacaaagatggttactttgtattcgatgtaccgaaagaaggtacttcagaaacagaagctaaattccgttatttctcaccaactggagaaatggctgttggcttgactcatgctggtggaggattgcaatactttgatgaaaatggcttccaagctaaaggtactaagtatgttactccagacggaaaactctacttcttcgataaaaattcaggtaatgcctacacaaatcgttgggctgaaatcgatggtatctggtatgaattcaatgatcaaggctatgcacaagctaagaagggtgaattctacacaacagatggctcaacatggttctaccgtgatgcagctggtaaaaatgtgacaggtgcccttactttggatggtcacgaatactacttccgtgcaaatggtgcccaagttaaaggtgaatttgttactgaaaatggcaagattagctactacactgtagataatggttacaaggttaaagacaagttcttcgaagtgaacggcaagtggtaccatgctgataaggatggtaacctcgctacaggtcgtcaaacgattgaccaccttaactattacttcaatgctgatggaagccaagtcaaatctgatttcttcactcttgatggtggtaagacatggtactacgccaaagataatggtgaaatcgtgacaggtgcctatagtgttggtggtaaaaactattacttcaaagaagatggtagtcaagtcaaaggcgactttgttaagaatgctgacggatcactttcttactatgacaaagattcaggtgagcgtctcaataaccgtttcttgacaactggtaacaatgtttggtactacttcaaagatggtaaggctgtaacaggacgccaaaatatcgatggtaaagaatattactttgataatttgggacgtcaagttaaaggtagcccaatcagcacaccaaaaggagtagaatactacgaatcagttcttggagaacgtgtgacaaacacatggatcactttccaagacggtacgactgtcttcttcgatgaaaatggttatgctgattttgataaataatcaatcaatctaatcttaatctgagagattaagtgaaaaacgatatgatttgacatgaatttataggtgaaatttcttgaaaacgagaatcgtttaaagaaattttgcctttttatgctccttaaagaaaaaatctgacaaatatcaattttgagtcagaatcattgtaaaagctattgtatcaaggactttggcggcttttatgaaaaatagttttagttatcaaatgatatgaaaatgagaattgaaaacctatgaaataggtgtgttacaaagtttttctaatattaatgttatgtaacatatattttataaaaaaataattaattcgagaaatagttagaaaataatgatataatataactgtttgaaatcggatagatttcagtctgattttgacaaataaaatcacggggaaaattataatggaaaataagatacactataagcttcataaagttaagaagcaatgggttacaattgcagttgcttctgtagcacttgctactgtcttgggaggattgtctgtaacaacatcttcagtttcagcggatgaaactcaagataagacagtaactcaatcaaattcaggtacaacagcttctttagttacttctcctgaagcaaccaaagaagccgataaacgtacaaatacaaaagaagcagatgttttaacacctgctaaagaaacaaatgctgtagaaacagcgactacaacgaacacacaagcaacagctgaagcagcaacaacagctgatgtagcagtggcagctgttccaaataaagaagcagttgtaacaacagatgcaccagctgtaacaactgaaaaagcagcagaacagccagctaccgtcaaggctgaagtcgtcaatacagaagttaaagctcctcaagctgctttgaaagattcagaagtggaagcagcactttctttgaaaaacatcaaatacactgatggtaaatattactatgttaatgaagatggttcacacaaagaaaactttgccattactgtaaatggtcaattgctttacttcggcaaagatggcgcccttacaagttcatcaacacactctttcacacctggaacaacaaatattgttgatggtttctcaatcaataaccgtgcctacgattcatctgaagcaagttttgaattgattaatggttatttgactgctgatagctggtaccgtccagtttctatcatcaaagatggtgtgacttggcaagcatcaactgcagaagatttccgtccacttttgatggcttggtggccaaatgtagatacgcaagttaattacttgaactacatgtctaaagtcttcaacttggaggctaagtacacaagcacagataagcaagcagacttaaatcgtgctgctaaggatatccaagttaagattgaacaaaagattcaggctgaaaaatcaacacaatggttgcgtgaaactatctctgcctttgttaagacacaaccacagtggaacaaagaaactgaaaactattcaaaaggtggaggagaggatcaccttcaaggtggagcccttctttatgtgaatgactcacgtacaccatgggcaaattctaactatcgtcttttgaaccgtacggctactaaccagactggtacgattaataagtcagttcttgatgagcagtctgacccaaaccacatgggtggcttcgacttcttgcttgctaatgacgtagacttatctaacccagttgttcaagcggaacaattgaaccaaattcactaccttatgaactggggttcaattgttatgggtgacaaggatgctaacttcgatggtatccgtgtcgatgcggtagataatgtcaatgctgacatgcttcaactctacacaaactatttccgtgagtactatggtgtaaataaatctgaggcgcaagctcttgctcatatctcagttcttgaagcgtggagtcttaacgacaaccattacaatgacaagactgatggtgctgcgcttgccatggaaaataaacaacgtttggccctccttttctcattggctaaaccaattaaggatcgtacaccagctgtaagtcctttgtataacaatactttcaatacgactcaacgcgattttaagactgactggattaacaaagatggaagcactgcctacaacgaagacggtacagctaaacagtctacaattggtaaatacaatgagaaatacggagacgcgtcaggaaactacgtctttatccgtgcccatgataacaacgttcaagatattattgctgaaatcattaagaaagaaatcaataaaaaatcagatggtttcactatctctgattctgaaatgaagcaagcatttgaaatttacaacaaagacatgctcagcagcaataagaaatataccttgaataacatccctgcagcttatgctgtaatgttgcagaacatggaaacgatcactcgtgtctactatggagacctttatacagatgacggtcactatatggaaactaaatcaccatatcacgacaccatcgttaacttgatgaagaaccgtatcaagtatgtatctggtggacaagcgcaacgttcttactggttgccaactgatggtaagatggacaattcagatgttgaactttaccgcacaagtgaagtctacacttcagtacgttatggtaaagacatcatgacagctgacgatacagaaggttctaaatacagccgtacctctggtcaggtaactcttgtagtgaataatccaaaattgactttgcatgagtcagctaaacttaatgttgaaatgggtaaaatccatgccaaccagaaataccgtgctttgattgttggtacagctgatggtatcaagaactttacatctgatgcagaggcaatcgcagcaggttacgtgaaagaaacagacagcaatggtgtcttgactttcggcgctaatgacatcaagggttatgaaacatttgatatgtcaggtttcgtagcagtttgggttccagtcggagcttcagatgatcaagatatccgtgtagcaccttcaacagaagctaaaaaagaaggcgaattgacccttaaagcgactgaggcttatgattcacaattgatctacgaaggattctcaaacttccaaactatcccggatggttcagatccttcagtctatactaaccgtaagattgctgaaaatgttgatttgttcaaatcatggggcgtaacatcatttgaaatggcaccacaatttgtatctgccgatgacggtaccttccttgactcagttatccaaaatggttatgcctttgcagatcgttatgatcttgccatgagtaagaacaataaatatggttctaaagaagatcttcgtgatgctcttaaagcccttcacaaagcgggtatccaagcaatcgctgactgggttccagaccaaatttaccaattgccaggtaaagaagtcgtaacagcgactcgtactgacggtgcaggacgtaagattgcagatgctatcattgatcactcactttatgtagctaactctaagtcatcaggtagggattaccaagctcaatatggtggcgaattcttagctgaacttaaagctaagtaccctaaaatgttcacggaaaacatgatctcaactggtaaaccaattgatgattctgttaaattgaaacaatggaaggctaaatacttcaacggaacaaacgttcttgaccgcggtgttggctatgtacttagcgatgaagcaactggtaaatatttcactgtcactaaagaaggtaacttcattcctcttcaattgacaggaaatgaaaaggctgttactgggttctcaaatgatggtaagggaatcacttacttcggtacaagtggtaatcaagctaaatctgcctttgttactttcaatggaaatacctattactttgatgcacgtggtcacatggttacaaatggtgaatactcaccaaatggtaaagatgtttatcgtttcttgccaaatggtatcatgttgagcaatgccttctatgttgatgctaacggtaatacttacctttataactataaaggtcaaatgtacaagggtggttacactaaatttgatgtaactgaaactgataaagatggtaatgaatctaaggttgtgaaattccgttacttcactaatgaaggtgtcatggctaaaggtcttactgttatcgatggttccacacaatactttggtgaagatggtttccaaactaaagataagttagcaacctataaaggtaagacttattacttcgaagctcatactggtaatgctatcaagaacacttggaggaacatcgatggtaaatggtaccacttcgatgaaaatggtgttgccgctacaggtgctcaagttatcaatggtcaaaaactttactttaatgaagatggaagtcaagttaaaggtggcgttgttaagaatgcagatggtacttatagtaagtacaaagaaggttctggagagctagtgactaacgaattcttcacaactgatggcaatgtttggtactatgcaggcgctaatggtaagactgttacaggtgctcaagttatcaatggacaacacctctactttaatgcagacggaagccaagttaagggtggtattgttaagaatgcagatggtacttatagcaagtatgatgctgcaacaggtgaacgcttgactaatgagttcttcacaacaggagacaacaattggtactatatcggtgctaatggtaagtcagtgactggtgaagttaaaattggtgacgatacttattactttgctaaagatggtaaacaagtaaaagggcaaacagtaagtgctggcaatggtcgaatcagctattactatggtgatagtggtaagagagctgttagcacatgggtagaaattcaaccaggagtttacgtttactttgataagaatggtcttgcttacccacctagagtgctaaactaattgatttaaaaaggagaacttcggttctcttttttatattttctgcgaaaaatagtttgaaagaaagtggttttcaagacttttacataacagagttttaatctattgttaagatagtaaaaaagtcattaaaataagttttcttaagtttttttgataataaaaaatgatataataagtaagtctttaaggtgtagattttaagacaaaatatatattggggaaaatcgaatatggaaaataaagtacgctataaactgcacaaagtgaagaagcagtgggttactttggctgttgcttcagcagctttggcaaccattgttggtggtagtgttgccacatcttcacatgtttctgcagaagaaactagtaactctaatggatcacctttaacaactacagtcggggaaaatacaaatcctgtagttgaaagagaagttggatcaacaactgaggtggcaaatgtttctaatgccacaaccacagaccgtgcagcagtaactgctgataaaccttctgaaacgtcagttcaaccaagtacaggagtgactgcagatagagttgcaacagtagatactgaagctaaacctgaaacgactgctaagccagaagtagtagctaaaccagaaacagctacaacaactgatgtagcaactaatgctggagttgctgctccaacgactgagaagtctaaggaactttctgaagctgagattaaggccgcagtctcactcgataatattaaaaaagaaaaagatggtaaatattactatcttcttgaagatgggtcacataagaaaaactttgccattactgtaaatggtcagctcctttattttgatgaaaatggtgccctttcaagtacatcaacatattcatttacacaagaaacaacaaatcttgtcacagattttactaaaaataatgctgcctatgattcaactaaagcaagctttgaacttgttgatggttatttgacagcagacagttggtatcgtccaaaagaaattcttgaagctggtacaacttggaaagcttcaactgaaaaagattttcgtccgcttttgatggcttggtggcctgataaagatactcaagtagcttacttgaactatatgactaaggcacttagcaacggtgaagaaacaaaagatgtctttacgattgaaaattctcaagctagtttgaatgccgctgctcaaatcatccaacgtaagattgaagttaagattgctgctaataagtcaacagactggttgcgtcaatcaatcgaggcctttgttaaagaacaagataaatggaacattaattccgaatctccaggtaaagaacatttccaaaagggtgctctcttatttgttaatagcgatttaacgaagtgggctaactcagactaccgtaaacttgatcaaacagcgacaagtcgtttggcaaaagacaagattaagagtggtagcgatgctggttatgagttcttgctttcaagtgatatcgataactcaaatccaattgtacaagctgaaatgcttaaccaattgtattactttatgaactggggacaaatcgtctttggtgataaggataaagatgcccactttgatggtatccgtgtcgatgccgtggataatgttagcatcgatatgcttcaattggtgtcttcatacatgaaggctgcttacaaggttaatgagtctgaagcgcgtgcccttgctaatatctcaattcttgaagcttggtcacaaaatgacccatattatgttgacgaacacaatacagctgccctttctatggataatggtctccgtttgtctattgttcatggattgactcgtccggtaacgaataagggtacaggtgcacgtaatgcatcaatgaaggaccttattaacggtggttattttggtctttcaaaccgtgcggaagttacctcatatgatcaacttggttttgcaacctacctctttgttcgtgcacacgactcagaagttcaaacggttatcgcagacattatcagtaagaaaattgatcctacaacagatggtttcacattcacattagaccaattgaaacaggctttcgacatttataatgcggatatgttgaaagttgataaggaatatacacactcaaatatccctgctgcctatgctttgatgcttcaaacaatgggtgcagcaactcgtgtatattacggagacttgtatactgataacggtcaatacatggctaagaaatcaccatactttgaccaaatcacgacacttcttaaagctcgttctaaatatgtagccggtggacaaacatcttatatccataaccttgctggtgatggcgtgtcatctgctaaagacaacaaagaagttcttgtctctgtccgttacggtcaagatttgatgtctaagacagatacagaaggtggaaaatacggccgcaattctggtatgttgacccttattgctaataatccagatttgaaattagctgacggtgaaaccattaccgtaaatatgggagctgctcacaagaatcaagcctaccgtccactcttgcttggtacggaaaaaggtattgtgtcatcattgaatgattcggatactaagattgttaaatacacagatgcacaaggaaatcttgtcttcacagctgatgaaatcaaaggctttaagactgttgatatgagtggttacctttcagtttgggtaccagtaggtgcgactgaagatcaaaacgttcttgctaaaccatcaacaaaagcctataaagaaggggataaggtttatagctcttctgcagcacttgaagcacaagtgatttacgaaggcttctcaaacttccaagactttgtcaaagaggatagtcaatacactaacaaattgattgcggctaatgcagacctcttcaagtcatggggcattacgtcatttgaaattgcacctcaatatgtctcatctaaggatggcactttccttgattctattattgaaaatggctatgccttcacagaccgttacgactttgccatgagcaaaaacaataaatatggttcaaaagaagaccttcgtgatgccctcaaggctcttcacaaacaaggtattcaagtcattgctgactgggttccagaccaattgtatactctcccaggtaaagaagtagtaacagctactcgtacagatacacatggtaaggtgcttgatgatactagcttggttaataaactctatgtgacaaataccaagtcatcaggaaatgatttccaagcacagtatggtggggccttcctcgacaaacttcaaaaactttatccagaaatcttcaaagaagttatggaagcgtcaggtaagacaattgatccatctgtgaagattaaacaatgggaagctaagtactttaacggtacaaacatccaaaaacgtggttcagactacgttctcagcgatggtaaattgtacttcaccgttaacgataaaggtaccttccttccagctgccttgactggtgatacaaaagctaaaactggatttgcttatgatggtacaggggtaacttattatacaacatctggtactcaagctaagagtcaatttgtgacatataatggcaaacagtactactttaacgataagggttaccttgtaactggtgaacaagctatcgacggttcaaactatttcttcttgccaaatggtgttatgtttactgatggtgttattaaaaatgccaaaggtcaatcattggtttatggtaagtcaggtaaattgacgactcaaactggttggaaagaagttactgttaaagatgatagtggtaaggaagagaaattctaccaatacttcttcaaaggtggcatcatggctactggtttgactgaagtagaaggtaaggaaaaatacttctatgacaatggttaccaagctaaaggcatcttcattcctacaaaagacggccacttgatgttcttctgtggcgattcaggtgaacgtaagtactcaggcttctttgaacaagatggtaactggtactacgctaatgataagggctatgttgccactggatttactaaggtaggtaaacaaaacctttacttcaatgaaaaaggtgttcaagttaagaatcgcttcttccaagttggtgatgccacttactatgcaaataacgaaggtgatgttcttcgtggtgcgcaaaccatcaatggtgacgagctctactttgatgagtcaggtaaacaagttaaaggtgagtttgtgaacaatcctgatggtacgacttcatactacgatgccattacaggtgtgaaacttgtggatacatcactagtagttaatggtcaaacctttaatatcgatgctaagggtgttgtgactaaggcacatacaccaggcttctatactactggggacaacaactggttctatgcagactcacatggacgtaatgtcacaggtgctcaggtcatcaatggtcaacacctctactttgatgcaaatggtcgtcaagttaagggtggcttcgtaacgaacactgacggtagtcgttcattctaccattggaatactggtgataaattggtatcaaccttcttcactaccggtcatgatagatggtattatgctgatgataagggaaatgtcgttacaggagctcaagtgattaacggtcaaaaactcttctttgctactgatggtaaacaggttaaaggtgactttgcaacaaatgcgaatggcagccgttcatactaccatggagctactggtaataagttagtctcaaccttcttcactactggagacaacaactggtactatgctgatgccaaaggtgaacttgttgttggcgaacagacgatcaacggccaaaacctttactttgaccaaactggtaagcaagtgaaaggtgcaacagctgcgaatcctgatggctcaatctcttactatgatgttcatacaggggaaaaggctattaatcgttgggttaaaattccttcagggcaatgggtatactttaacgctcaaggaaaaggctacgtgtcaaattaagattaatgaatgaaagaagtcaatcactttttgtggtggcttttttcgttaaaaaaattgtctcttttttatacattcaggtcatttgtctgggcaaaaaagtggtataataactcttgctaaatctttattttggagtaaacatggctaagtcaaaaaatactattgaaagtcggatagattactcgattctcttgccagtccttatattgctactggttggtttggtttcgatatttatagcgacaaattttgattacccaaagaatcttgtgcaagtcatgtcccagcaagtactatggatttttctaggttcagtacttgcttttgttgtcatgttatttaatacagagtttctttggaagataaccccctggctctatatttttggtctgggacttatggttttaccccttgttttttattcgcctgctttggtggcctcgacaggggcaaaaaactgggtcagtattggatcggtcacccttttccaaccatcagaatttatgaagatatcctacatccttttcctttccagaattggtgtttgggccaagcaaggaaaggaagtgactgacctaaaagatgactggttgctacttttccaatatgtagctgttacgcttcctgtcttggggttattagttcttcaaggagatatggggaccgccttggtctttctggctattttagctggtattatagtggtttcagggatatcctggcgtattatcctaccagttgttttagcctttgctgcaggtttagccttgtttgtgatggtatttaccacagattggggtaaggaagccatgctcaagatgggagtgcaaacctaccagattaaccgtatctcagcttggttggatcccttcacttatgcagatggtatcgcctttcaacagacacaagggatgatttcgattggtactggaggaatctatggtaaaggctttaatcatctggagttgaacgtaccggttcgtgagagtgatatgattttcacagtcattgcggaagattttggtttggtaggtggtggattggttcttctaacctatctcttcctcatttaccgcatgctgcgagtgacgttcaaatctaacaaccgtttctatacctttatttcgacaggttttatcatgatgattgtcttccatatttttgaaaatattggggcagcagtgggaattcttcctttgacaggtattcctttacccttcatttcccaagggggatcatcactcatctctaacttgattggtgttggtttggtgctttcgatggcttatcaaaccaacctcaacgaagaaaataaaattctcttggctatgtctcgccgtatgcgtacgtctggaactagtcaagtgaaacctatttctaagagtaagtctaagaaaaacaagccttcgaagagtgttactatggccactcaagaattgggcaaggctaaagataaggttgataaggccactgagaaaatgcgtcaaaccatttctcaaaatacgccaagcattcatcaagggaagcgtcgtaagggttcgaaaaagaaaccgacacgtaaacattaagaagaagcaagttggttaatccaacttgtttttctttgaaaaaaattaaggtctgtgaccttttctttgctcctgcctgtggtataatagaagctgactattttgaaaaggggtttgctatgatagagacagccaaacagcaagaacgtgctattttagtaggtgttgaattgcaagaaacagagcattttgacatgtcaatggaggaactggccagtcttgccaaaactgcaggagcagaggttgtagctagctatacccaaaaacgtgaacgctatgatagtaagtctttcgtaggttcaggaaaattagaagaaatcaaggccatggtggatgcggatgagattactacagtcattgttaataaccgtttaacgcctcgtcaaaatacaaatcttgaagcagcatttggcgtaaaagttattgatcgtatgcaattaattttggatatctttgccatgagggctagaagccatgaagggaaacttcaggttcacctagctcaactaaaatacatgttgccccgtttagctggtcaagggattatgctcagccgtcaagcagggggaattggtagccgtggacctggtgaaagtcaattggagcttaatcgtcgttcgattcgtaaccagattgctgatattgaacgccagttaaaaattgttgagaagaaccgagaaaccattcgcgaaaagcgtgttgattcaagtacctttaaaattggtttgattggttatactaatgctgggaaatcaacgatcatgaaccttatgacggatgataagcaatatgaggctaatgaactttttgcgaccttggatgcaacgactaagaaaatttacttaaaggatcagtttcaagtgaccttgacagatacggttggttttatccaggacttgccaacagaattggttgctgcctttaagtcaacacttgaagaaagtcgtaatgtggaccttcttttgcatgtcattgatgcgagtgatcctaatcacgaagagcatgaaaaggtggtcttagacattctcaaagacttagacatgactgatatccctcgtctagcaatttacaataagatggatgtagctgataatctagtagccacagtctttcctaatgttcgcctctcagcacgtgacaagggaagtcgtgaggccctcagaagactcttgattgacgaaattcaacagatttttgaaccttttagtattaaggtacatcagaatcaagcttataaactttatcagttgagtcaattagccttgctagatagctactcatttgagacagaagtggaagaaattacaggttatatttcaccgaaaaataaatggaaattggaagaattttatgactgattatatggatttagctttaaaatatggtggttttacaagtttagataaggtctatttggaaaataccttgtcagacctttcggacagtcaaaaattggctttcattacgccaccaccaagcgtgattaatgcttattttgcagagatttaccaaaaacaatctcctgaagcagcgacggattactatttggacctttcaaaggagttaaacctctttaaccctgcaccatcttttgatgagcacaagccttttattcgtctcaatctgtcaggaaaatcttatggattttgctatgaaaatgctgatgaggtggccttagtctttgctgagcatttagaggttccaacggctaacattttgtttgagcttgctcaagtttttccgcagtataaggtctatcttgaaggcactcaaattaagatggccaaggttgattttgacgaagaagtattggaagagttaacacctgagacacagttacttagtcgtgtaactaagttgaagggggatgtcattaagttggctagcttcaatcaagatgaattagtggaacttttgtctcgatataaagggcaaaccgtttattatggctttgctcagcgtgaatgcctggcttatattgtccagaaataagaagaacgatagatagaaagtataggaagtcatggaattacaatttttagggacgggtgccgggcagccctccaaggcccgtaacgtgtcgagtctggttctgaagttactcgatgaaatcaatgaggtctggatgtttgactgtggagaaggtacccaacgtcagattttagaaacaacaatcaaacctcgtaaagttaaaaaaatctttatcacacatatgcatggagaccatatctttggcctacctggtttcttggctagccgttctttccaatcgagtgaagaacaaacagatttagaggtttatggtccagtcggtattaaacaatatgttatgaccagtcttcgtacctctgggacacgcctaccttaccatgtgcattttaaggaaattgatgagcataagcttggcttggttatggaaaatgacaagttcgctgtttatgcagataagttggatcacaccattttttgtattggctaccgagtggttcaaaaggatctcgaaggaaccttggatgctgaggctcttaaagtagcaggtgtgccatttggaccactttttggtcaaattaagaatggtcaagatgtggttcttgaagatggaacgaaaatcattgccaaggacttcatttccgcacctaagaaaggtaaggttatcactatcttaggtgatacccgtaagacaaatgccagtgttcgtcttggattgggggcagatgtcttggttcatgagtctacttatgggaagggcgatgaaaaaattgccaagagccatgggcattcaaccaatatgcaagcagcacaggtcgctaaagatgcgtcagctaaacgccttcttctaaatcacctatcagcacgtttcatggggcgtgatatcggtaagatggcagcagatgctaaaacaattttcgaaaacacccacatcgttcgtgacttggaagaggtagaaatctaatggctaaacaacgtattattgctattactggtgcctcaggaggccttgctcaagaaattgtcaagcagctctcacccagtgatggtattatcctcttaggacgagacaaggacaaacttgagaaatgttatcgccatgtggaaaataaaacctgtcttgccattgaccttagagacgacaatgctattaaaaaaatggtagattatctctatcaacgatttggacgtattgacatctttatcaataatgctggtttcggtgaattcaagtcttatgataactacactagccaagaagtccgtgatatgtttgatatcaatacctttgcgacgatgaccttttcacgtttgatggctgagaaaatggtgcaacatggccatggccatatcgtcaatatcgccagtatggcaggaaaaattgcgacagccaactcaagtgtttatgcagcgacaaagtttgcggtaattggcttctcagatgccctgcgtctagagctggctgataaaggagtctatgtgacaacagtcaatcctggtccaattgagacaggtttcttcaatcaagctgatccctctggagcctatcttgagagtgttaaaaagtttgtcctcagtcctaaatacgtggctaaaaagattgtccatattctgggcaaaaataaacgtgaagtcaatctaccacgactcttagcagttgcccataaaggctatacgctatttccacgaatctcggacaaactagctaccaatgtgtttaactacaaataggagaatactagatggccgcaaatatccaagcgtatttagagaatctcaagcaaccctggggtcaaatctattatgatatcctttttgagcaattaaaggacatcaagggaaagcgagtgcttgattttggcagtggctttggccttgtggccaaccacttggctcaagaaaatcaagttctagctgtagaacccaatgaagaaatggtggccttgcggccccagaatcacccctatcagcaactagtcgggagtctggatcagttagaaagctttgaggatgctagctttgatgtcattctctgccacaatgtcttagagtatgtagagaatcgcaaggctgttctcaaggcattcatccgcctcttgaaaccaggaggcctgctctctatcgtcaagcacaatgaagtcggccgagtcctacagaccgtcgtcttcgaaaatgatactcagaaggccctcgatttactagcaggccaagatctggaaacccactccatgggtttggctcaggcctatgatcttgatgcagtagtagaaaatttagctcttgaaattaaagactaccaaggaatccgtgtcttttatgccttgcaggacaatcgcttcaaaggccaagagggatggcgagagtctatgcttaagatagagctggcggtctgccaaaagtccccttatcgggatatcgccttcttccagcattataggttaaaaaggagttaagatgttaaattataaaaaagagattccagcgatgacagacctactcgcactgtacagttcagtcggctggaccaattatactaacaatccaaccatgctagaagaagctgtcaaagccagtctctggcagttggcagtctatgatgagaaagagctggtagcctacattcgcttagtaggagatggccattctgtcatttttgtacaggacctcttggtgcgaccagatcaccagcgccaaggcattggcacgaaactcttagaagaggctttagcgactttccccaatgtctatcaacggctccttgccactgatcgtagcgagaaaaatttagccttttaccagtccctgggatttgtcgaactttcagagcaagcttgtacagggatgatttataaatattgatgtagaggatttccaaatagggaatctttttcttgtttttcctaatattacttgaaaatgatagtagactagagttagttaacgtaaagaggagaagggaatatctgagaaaacacaagtcaaaaagggagcaatatccagactattattttgtctagaaaagcaggtcttgattggaaatgtaccacaagtctaagcaacttacgatgtttgacattctctttttaggaaacttagctttctatccactatgataaattttttcatgttataatagatagactagatgacagggagaaaagataaaaacatgattacatcaacgtatgattggaaaataaacacaaaagagccagatgctggcttttttaaacttgccaaagaacatgggctggcagaaactgcagccaagattgcctatgaacgaggcattacgacagaagaggctcttgaagcctttctaaaggctgatttatcacaccttcatgacccttatcttcttcatgatatggataaggcggtggctagaattcgtcaggccattgaaaattacgagcaaatcttagtctatggagactatgatgcggatgggatgacgtcagcatcgattgtcaaggaagctcttgaaatgatgggagctgaggctcgagtctatttgcctaaccggtttatagatggttatgggccaaacgaaagtgtctacaagtacttcattgaacaggaaggcatttcactcattgttacagtggataatggggtagcggggaatgaggctatcgcttatgcgcaagagcaaggtgtggacgttatcgttacagaccatcacagtatgccggcacagcttccagatgcctatgccattgtccatccagagcatccagatgccgattatccttttaagtatttggcaggttgtggtgtagctttcaaattggcaactgccctccttgaaactattcctactgagatgttggacttggtagccattggtaccattgccgatatggttagcctaacggatgaaaatcgtattatggtcaaggtcggcctggaaattctaaagactactgagcgtattgggcttcaagaattgctccgcatttcagatgtagacccaacaacgatttctgaagaaacggtcggtttcaaactggctcctcaactcaatgccttgggacgcttagatgatccgaatccagccattgaactactgaccggatttgacgatgaggaagctcaagccattgctctggaaatcaatgctaaaaatgaagaacgtaaggaagttgttcaaaaaatctttgatgaagccatgactatggtagacttggacaaaccagttcaggttttggcaaaggaaggttggcatcctggcgttctaggtattgtggcggggcgtatcatggaacaaatcagtcagacggtagtggttttgaatattgaagatggcttggctaagggttccgctcgtagtttggaatctatcaatatcttccatgcgcttgatgaccaccgagacatctttactgcttttggaggacatgctggagcggcggggatgacccttccagaagaaaatcttggacgactatcagagattttgtgtcattatatctacgataataacattgatacgagtgccaaaaatacgttaaatttagacgaggagcttcaactcagcgagcttagcttggataccattaagagccttgaaaaactagcaccttttggtatggataataaaaagccagtcttttggctacatgatattaccgttactcaagctaggacaatgggacaaaatggagtccatcttaagtttaaggtgaagcaaggcaaggatagctttgacgttgtcgcttttaataaaggtaatctgcttcaagaatttcaacaagctcaaggtttggaattggcagtgaccttgtctgttaatgtttggaatggacagacaacgctacagctcatgctagaagatgcgcgtgtggatggtgttcaattatttgattttcgatcaaaaaacatgtcactgcctgaaggtctaccatcggtagaagaagcagcagacacagagcctgcggttgtcctcaacaccctacctgaatcagcgacagaattaaaagagtggtttgaaggtaaagattttcaggctatctattttaaaaatagcattaaggaagcctattatctgacaggttatggaacaagagagcaatttgcaaggctctataaaaccatttaccaattcccagaattcgatgtccgctataaactggatgaactcagtcattaccttaaaatcgacaagattctcctgattaagatgattcaaatctttgatgaattggattttgtgactattgataatggtgttatgacagtcaataaagaagctgaaaaacgtgagattgaggacagtcagattttccaaaatctgaaacgactagttaagttccaagaactcatggctctgggaacaccacaggaaatttatgattggctgtataagtaggggagtcttaatccaaaggattcgtctcgaaatgagggttagcattttctaaatttactatttcatgctataatggtatgtaaatatttttttggcgaaaagcctataggaagaacaaatgaaattagaagattatattgcatctattgaaaactacccaaaagaaggagttactttccgtgatattagtcctttgatggctgatggaaatgcttatagctatgctatccgtgaaatcgttcagtatgcgactgataagaagattgacatgattgttggtcctgaagcacgtggtttcatcgttggttgtccagttgcttttgaacttggtattggttttgctccagttcgtaaacctggtaaattgccacgtgaagtgatttcagcagattacgaaaaagagtatggtgtcgatacactttgtatgcatgccgatgcaatcaagccaggccaacgtgtacttatcgtagatgaccttttggcaactggtggtaccgttaaagctacaattgaaatgattgagcgcctaggtggtgtcgttgctggttgtgccttcttgattgagcttgatggtcttaatggacgtgatgctatcgaaggttacgatactaaagtattgatgaacttcccaggataaatctatctatgaactaacaaaaggccttagggcctttttaactcttttaaaacaaaggtggcctctaaatatagtttaaagctatagctaactagagaaaatatatatttgataacaatacctccccggtttataatatgaatatagaataaataaggatggagatattgttatgcctataaaacttgataataagttaccagctcttgatgtattgcgttcggaaaatgtcttcatcatggatgagaacagagctagtagccaggatattcgaccaatggaggtcttaatccttaaccttatgcctactaaagaagttacggaaactcaattactacgtcttttggccaatacgccacttcaaattaacgtcgagttcctttatatgactagtcataagtcaaaaaatacccatgcagaacatatggaaaccttttataagacttttgatgaaattaagcataagtattatgatggtctcatcgtaacaggtgctcctgttgagcaaataccttttgaagaagttgattattggcaagaattgacacaggtttttgactggtctaaaaagcatgtctattcaacccttcatctgtgttggggagctcaagcaggtctctattataagcatggagtcgacaaggtcccattgtcagagaaactatctggtatctataaacaaacggttgacatgcctgaaaacttccttatgaatggctttgatgacagctttgtgtcaccacattctcgctatactgaggttacgctcgaggatattaaaaacaagacggatttagatattgttgtgtcaggaccagaggtcggtttatccatcttagcaagtaagaatcttcgtgaagtatatagtttcggtcattttgaatatgacagtgatactctagccagagaataccgaagagatttggatgcagggattaatccagacgtaccggcaaactatttcccagaggatgatccaagtcaggagcctaaacttcgttggaatcttgcggcatctgctttctttagcaattggattaattatgcggtatatcaagaaacaccttatcgtttagaagagttggaagacgatttttcattctacggttatttgtagtagacagtctcaaaagatttatgtgagcgcataaagactttttggggtgtctatctactctgaaaggtaaatatgagtttttttgaacagtatcgatcaggcaatctggtccttcctaatgctttatttttccactttaaggatatttttccatctgcggatgactttctggtttggcaatttctctatctacaaacgacaactcagattggagaagtagcttctagtcagatagcgcaagcaactggaaagacaccaactgaggttaataaaagtattacgacattgactgaggctggactccttgatttcacgactattaaggttaataatgaaattgagatggttgtagatgcttcacctgccttggcagttttggacaagttagtgagcaatgaaaagacaacgaccgggcctgtagttggtcagccaacaaatacacagctcatcaagcaattaacagatgagttagaacaagctttgggaatcttgaatcctatggttattgaagatttaaacaaggaaatccaagaagaacatactgatcccgaacttatccgtgaggctttgaaagaagcagtatttaaccgcaagacaaattggaattacatcaaaggggttctgcgtaactggaaattgagtggtattacgacgaaaattcaagttgaagagcgtcgtttggagcatcaaggtaagaagcaccatcaccaagtttcggatgacttcaaaacaggaatggatgcagcccgtcaattatggggtggccaataatgttaggaagaaaacgtgttaatgaggctctaactctcatgggggagatgtttcccaatgctcatggagagttggagtgggaaacgcctttccaactgttagttgctgttattttatcagccaagacaactgataaggctgttaataaaattacaccaggcttgtgggcgcgttatccagaaattgaggatttggcttctgctaatcttgatgatgttgagatgtgtttgcgaacaatcggtctttataagaataaggcaaagaacatcatcaagactgctagagctgttttaatgaattttgatggacaggttccgaaaacgcataaggaattggaaagtctgcctggtgtgggacgaaaaacagctaacgtggttttagctgaggtttatggtattccttctattgctgtagatacccatgtctcacgtgtttctaaaaggctaaatattgccccagaggatgctagtgtagaggaaatcgaagcggaactgatgaagaaaatcccaaagagggattggattatcagtcatcaccgtatgattttctttggacgttatcattgtttggctaagaatcctaagtgtcagacatgtcctcttcaaagttattgtaagtactataaagaaacaactaagaaataagctggagaatgtgactttcttcggctttttacagctgtaagaatttgttacaaactagtaacttgacaaaagtctcaggctttaagaaaatagaagaaacgatttagaagcaggagcgatatagtgaatggctgaattcagtaatgaagagtatctgagagccttagctgataatggtgatagagaagcagccaaagaatatgagcaagctttggataatcgtatttttcagttgcagatttcattggctcaaacgagtgatccgcagggtcgtagggaagtgcaaaaactcttggaacaagaggaaaagaaaaaaagggactactttcaagaaaaagaggaaaaagctgtgagcgaatttagacgtcgtaaaaatgaaactacaaagggaagaaaagttacgagttttgataaactcaaagatcctaatatcattagatgggtaattggagttgttgcagtacttgcagtggttattcctgtggttaccttgatgtggtatagtaataaccaaaaagagagtgtaacaaatccatggaaaaacggtcagttggctaaaagcaaggaagcagctgcagcatcatctgataaccaatcctctcaagttgatacctcatctttgtctgaccaacagttagaagactgggtagtttctacttatgctaaagaacaggggtcaacaggagaaaattataagaatctaggttggaatgtctattcatggactgacgatgacgatgaattggtatatgctcaactttatgatgcctatggtaatgatgttcttcttttccgtgtagataagaaggggcaactcgaagcctatggtggtattgacggttcaagcgattcttgggacgtcgtttcaaaaacatatacaaccgattaatgaaactatataaaacacctgacaatggtggttgagactgtcttttgacagtcttttttggtataattttaagtaatcgtgtatacaattaaaaagctgattgagaggatttggggatgatagttctacagaacttttttaatgtcttcaggttttcaaggattgcttaaataaaggagagttgtcgtgtcagactatttatcggtcacatccttaaccaaatatttgaaaatgaaatttgaccgtgatccttatctagagagggtttatttgacggggcaggtttccaattttcgtcgacgtccgagtcaccaatatttttcgataaaggatgaaggggctgttattcaggcgacgatttgggctggagttttcaaaaaacttggttttgaactcgaagaaggtatgaagatcaatgtcgtaggtcgtgtccagatttatgagcctagtggctcttattccattattatcgagaaggctgagccggatggtattggagctttggctatccagtttgaacagcttcgtaaaaaattgactgcagaaggctactttgatgatcgtcataagcaagcgctgcctaattttgtcaaaaaaatcggggttgtcacaagtcctagtggtgcggttattcgagatattattacgaccgttagtcgtcgttttccaggggtagaaatcttacttttccctaccaaggttcaaggtgaaggagctgcacaggaaattgctgaaaatattcaaaaagctaatcaaagggatgacttagatttacttatcgttggtcgtggtggaggttctattgaagacctctgggcttttaacgaggaaattgttgttcagtccatttttgagagtcgtctacctgtgatttcaagtgttggtcacgaaacagatacgactttggctgactttgttgcagatcgtagggctgctacacctacagcagcggcagaacttgctactccagtatcaaaggccgataccttggtttggattcgtgaaagacaaaatagagcctatcaagcctgtttgagacgtatacagtataaccaggaacgcttggccaaactgtcacaatctgttgtctttaggcaacctgagcgcctatatgatggttatttacaaaagttggatcgactaacaacaaggcttgaaacctttatgagtcaagatttcgaacgcaaacaaaaagaagcggaacttttgagacaacgattacaaggcttaaatcttctgactagtgttcagaactaccaagaccgtcgaaagtctttgcaacgtttattggtgaccacaaccaagaacaccattaatggtaaccgtgtgagattagaaaaggcacaggatgctttattgtctctagatactagccgtattattgcaaggggctatgctattgtcaaaaaagatgataaacctttaaccagtaccaagaatattaccgaaggtgatcaattaaccgtccaaatgagagatggagaactagaagtagaggtgaaaaatgtcaactaaaaaaacatttgaggagaatttacaggacttagaagccattgtcactaagctcgaaacaggtgatgttgctcttgaggatgctattgctgagttccaaaaaggtatggccttgtctaaggatttgcagaagactttggaagatgctgaaaaaacactagttaaggtcatgcaagcagatggtacagaaacggaaatggatgcctaatgagcaagctaaataaaattgatgcggctatccgtgattactaccaaaaaaagaatcttcctgtatcaagtgatttaatcactgctattctttattcagttgatagtggcggtaagcgtattcgtccactgattttcttagatttacttgaaggatttggtttagagctaactcctagtcatttcgatgttgcagcgagtcttgaaatgattcatactggaagtttgattcacgatgatctgccggccatggacgatgatgattaccgtcgaggacgtttaaccaaccataagaaatttgatgaagcaacggcaatcttggctggagattctctctttttggatccatttgatctcctggctcaaacagacctatccgcagaaattcgagttcaattgattcaagcattgtctcattcttcaggaaccttcggtatggtaggtggacaaatgttggatatgaagggtgaaggtcaggaacttgatttatcacaattggctaagattcatgagcataagacaggtaagcttttaacctttccttttgtggcggctggtattgttgctcaaaaagatcaacaggtcttagaaaatcttcaagaagctggtcgcctaattggtcttgcctttcaagtacgtgatgatattttggatgtgactgctgatttcgaagaacttgggaagacacctggaaaagatgtagttgctggaaaatcaacctatccggctctgcttggtcttgaaaaatcacatgctatcctcgaggaatcacttaataaagcggaggctattttccaaaatctagctgagactcaaggctttaagaaagacagtattatagaaatcatagaaaggttacgactccatgcctaaggaaagagtagacgtcttggcttataaacaaggcctttttgaaacacgggaacaggctaaacgtggcgttatggctggtttagttgtgaatgttatcaatggtgagcgttacgataaacctggtgaaaaaatcgacgatggtacagagttgaagctcaagggtgaaaaactcaagtatgtgagtcgtggagggcttaaacttgaaaaagctttggaagtattcaatctgtcggttgaaggtatgacgaccatcgatatcggagcttcaacaggtggctttaccgatgttatgcttcaaaatggtgctaaattggtttatgctgtagatgtcggtaccaatcagttggtttggaaattgcgtcaagatgaacgtgttcgttccatggagcaatataatttccgttatgctgaacctgtcgattttacggaagggttaccgtcttttgcatcaattgatgtcagcttcatctctcttagtctgattctaccggccttggctaagatattggttgatggagggcaagttgttgctcttgtgaaaccccaatttgaggctggccgtgaacaaattgggaaaaacgggattgtccgtgagagcagtgtccatgaaaaagtgttagaaacagtgacagcttttgcggttgactatggcttttcagttaaagaactgaacttttcacctatccaaggtggtcatggtaacattgagtttctcgcacacttggagaagacaaattctcctcaaaatgatgctcaaacctctattaaggaagttgtagcacaagcacataaggagtttaaaaagaatgaagaagaatgatcgtttggagttaatccgaaagattgtccaagaaaataaaattacgacccagggagaattggtaaaattacttcaaaatgagggattaaaggctactcaagcgactgtatcgcgtgatatcaatgaaattggtattaccaaggtgccaactgaagacggttcttacatctatgggctctcaactgttcctagacgagtaggtggaacatctgttgcgccccgtcgcttgttgcgtgttgatcgtcaacatgccttaatgaatatcgttgttcaacctgggacaagccgcctcatcaagaagattcttttggatgagtacaaacatttgatttttagtgtcattgctgacgatgataccctctttttagtggctcagtcagagttagcagctatcgaactacaggggcaaatcattaagtgggttgaagaataggagggcctatgcttctcgaaattacgataaagaatttcgcaattattgaagagatttctctaaactttgagaatggtatgaccgtccttactggtgaaacaggtgctggtaagtccattattatagatgccatgaatcttatgttgggcgcacgtgcttctagcgaagtcgtccgtcattcagcatctaaggctgaaattcagggcttcttttcaatcgaacaaaatcctgccttggttagtatcttggaagctaatgggattcctgtcgaggatgaattgattatccgtcgtgaaatcttccaaaatggtagaagtgttagtcgcatcaatggacagatggtcaatttaacgacacttaaagccgttgggcacttcttggtagatatccatggacaacatgaccaggaagagcttatgaagactgctctgcatattaccatgcttgatgcctttggtgacaaggaatttttccagactaagaaagagtaccaagagtattttgaccgctatcgtgagttaagaaaagccgttcttgaaaagcagaaaaatgagcaggagcataaggctcgaattgaaatgctagcttttcagattgcagaaattgaagcagtctctctaaaatcaggagaagatttggcattgatgaaggagcgagacaagcttcttaaccataagcagattgctgataccttaaccaatgcctatgtcatgctggataatgaagatttttcaagcctttcaaatgttcgttctgctatgaacgacctccagtctcttgaagagtatgactctgattacaaagaactctctggaaatctatcagaagcctattatgttcttgaagatgtcactaagcaacttggtgaccttttggataatttggactttgatgctgggcgtttgcaagagattgaacaccgcttagatacgattaatgcaattactcgtaaatatggtggaactgttgatgacgtcttggattatctggaaaattcaagtaaagagtacaatcttctgactggcaattccagttcgtcagatgccatggaacaagagcttaagcaacttgaaaaagatctgctagcgtctgcagagacactacaaacggcacgccatcaaatagctaaggctcttgaagctgaaattaagaacgagttatgcgacctttacatggataaggctgattttaaagttacctttactaaagggaaatttaaccgtgatggcaatgagcaggttgagttttacatctcaaccaatccaggtgaaggctttaaaccgcttgttaaggttgcttcaggaggagaattatctcgactcatgttagcgattaagtcagcctttgcccgcaaagaagacaaaacaagtattgtctttgatgaggttgatactggcgtttcaggtcgtgttgcccaagccatcgctcagaaaattcataagattgggagtcatggtcaggttttggccatcagtcaccttccacaagttattgccattgctgattatcagttctttatttctaaggaaagcgataatgagacgactgtctctcgtgttcgtctcttgacacctgaggaaagggtgcaagaaatcgctaagatgttagcaggtgataatgtgacggaggctgccctgagccaagcaagagccttgttaaaggtggatgactctctttagaaaaagacttgggaaaagttttccagtcatgctataatagaataaaaatttgtgttaagcgagaaaaatatgagtaaaatcagaattgtaaccgattcgtcaattacgattgaaccagaattggttgaaaaatataatatcactgttgttccattgtcggttatggtggacggtgtcatctattcagatagtgatcttcgagaagaaggccgtttcttggatatgatgaagcatagtaaagagttaccaaagactagccaaccaccagtaggtttgtttgctgagacatatgaaaagcttgtcaaagaaggtgcggaacagattgtggctatccacatcatgcatacactctctggaacatgtgaagcctcacgtcaaggagctagcctgtcaggagcagatgtaaccgttatcgattcaggctttacagatcagtgtctcaagtttcaggttgttgaagcagctaaactagctgaagcaggagcaagtcttgatgagattgtagcacgtgtggaagaagtgaaaagtaaatccgaacttcatatcggtgtgtctacccttgagaatcttgtcaaaggtggtcgtattggacgtgtaacaggtctactatcttcattgctcaatatccgtgtcattatggagttgaaagactatcagttaaataccattgcgaagggtcgtggtgctaagacattcacgaaatggttggattcttatattgatagtatcaaggaccgcaaagtggcagagattggtatttcttatgcagggacacctgattttgcacatgaaatggctgaaaaacttgaggttttgggtgccccaatttcaatccttgagactggttccatcattcaaacgcacactggtgaaggcgcctttgccgtaatggttcgttatgaataagtggaaagaatcagaattagttagaagcctcctaggcttcttcttgctttttctcttttttgtcggcctcttcatttttgtagttcctagtacgcataagtcatcaaaaattgcagaaaagatcaaatctatcaaaaatgaaaaggtcacctatgttgctattggtgattcccttacgcaaggtgtaggtgatagtagtaatcaagggggctttgttcctgttttgtctcaggccttagagtcagattttgactggcaagtgacctctcgcaactacggtatcgcaggaaatacgagtaatcaaattctcaagagaatgcaagaaaagaaggatattcaaagagatctcaagaaggctaaagtgatgactctgacagttggtggtaatgatgtgatccatgtcattaaggacaatatcactaatcttaatgtagacaccttcactaagccagctcaggcctatcaaaagagattgggacagattattgagctagctcgtaaggataataaaacattgccaatttatattgttggtatttacaatcctttttatcttaattttccagagatgacagaaatgcaaactattgtagataattggaaccaatctactgaagaagtgtgcaagaagtacgataatgtctattttgttcctgtaaatgatttgctttataagggaattgacggtaagggcggtgttacaagctctgatgattcgtctcagtctagtaaatcttctcaagatagcctgaatgatgctctttttgaggatgatcattttcatccaaataatacaggttatcaaattatgtcagatgccattttgaaacgtattaaccaaacaaagaaggagtggtcaggtgagtaagatatggaagtggttatttttaggactcttggccttaaatctagccttagttagtgttgtggtctatagaatcatgactccagtggagacgacgagttctgtatccctacctaagggagcaactaaaattggtaagtatagtatgactagggaggagcttgacgctgctcttacaggctttgcccaagattattcgaccgataagatgcgtttcaaggtcaaggttaccaattctaaaattgttttcgaaagtagctataaggttttaggtcatcctgttcctctttatgtctactttacgccggttgttagtgaatcaggagcaattgtacttcatgtttctgagctttcagctggaaccttgaaactgcctgtttcggatgtccttaagatgattaaacgttcaactaaccttcctgattacatcgccatcgatagtaagaagggaaaggttaccctaaatattcagtctatgaagaatgagaaggggataacagcacgtgctcaaagccttgatttggttaatgaccgtatcgaatttgacatctataagacaataaattaaaaagcctttactttttgcaaaaaagcgattaaattagcgtttattacttgacctcataggccttttaggataagataatacttgttcaagcgctaaaaaaactattcgcttagaaataaattggaggattgttacaatggctaacaaacaagatttgatcgctaaagttgcagaagcaactgagcttactaaaaaagattcagcagcagctgtagatgcagttttcgcttctatcgaagaattccttgctgcaggtgaaaaagtacaattgatcggtttcggtaactttgaagtacgcgaacgcgctgctcgtcaaggtcgtaatccacaaactggtgaagctatctcaatcgcagcttctaaagttcctgcatttaaagctggtaaagctcttaaagacgcagttaaataatgtaaaaacccctaagattttaggggttttgatttatacgaaataagttaaggaaatctatgaaaaccataacagtggtattgatttttcttttggtttttactgttattaaactatcaggtattgttgctattagcaaactgatgaagccaagtgaaaaacaaatcgaagaagctcgtcagaaacgtcttcaagctgagaaagagggcaaggatccttttgaagactgggatgaacgtgacgatgatggtcttgtctaataagagaaacctcatcaaataataaaaaagtttggaagaccttccaaactttttttgtagactagtcaatgtagtgaagttttcctcggaagtcttcaagagtttcgtaacctttttcttccatgatttctttaagttctttagtaatacggtcaaaaacagcgacaccttctttttgaagggcagtacccacttgtaccatacttgcaccacaaaggatgtgttcaaaggcatcacgaccagatttgacaccaccagtaccaataatttggatttcaggtttcagacgttggtagaaagcgtgaacgtttgccaaggcagtaggtttgatgtagtcaccaccgataccaccaaaaccattcttaggtttgatgacaacagactcatcttcgatgtaaaggccgttaccaattgaatttacacagttaacaaagacaagtgggaattggttgaacactgcagcagcctggtcaaagtgcacaatatcaaagtatggtggtaatttcacaccaagaggttttgtaaagtaagagaagacctcagtaaggatctcggttgttgtttcaaaatcgtaagcgatttgaggtttacctggaacgttaggacatgaaaggttgagttcaacgagcccttcgtagtcactttcttgaacttttttaagaatagtgtgcgtttcctcaggtgagagaccaacaagtgaaagaaaatgattttttgtattgggttgcttttgcaattcaatgacatagtcaaggtagtattcaaaaccgttatttggcaatcccattgagttgattgacccaagagggacattcacataacgtggttcaggattaccaggacgggcctcaagtgtccctgtttttgtgacaaatgaccctgcagctgaagcctcaacctctgccaattcttccttagtcatacaatgaacaccagcggcattcataagacagttagcaaatgtaaactgaccaacttttgtagcagtagaaaccataagatcctccttaaagatcacaaagtaaaatgttactatttcatctcattttagcatgaaaagaggcctaaaacaaggaaatgttggacagctaaaagtatctaaaacaaaattctgataccgtctcttttagtcaaggctagaagcgatagaattttacagaattttttggattttgctagctttttcaaggttttttgggtagaatagatagagtaaatgggtataacccaaaataaaaaggagacataactaatggtaaaattggttttcgctcgccacggtgagtctgaatggaacaaagctaaccttttcacaggttgggctgacgtagatctttctgaaaaaggtactcaacaagctatcgacgctggtaaattgatcaaagaagctggtatcgaatttgaccaagcatacacttcagtattgaaacgtgcgatcaaaacaactaacttggctcttgaagcatctgaccaactttgggttccagttgaaaaatcatggcgcttgaacgaacgtcactacggtggtttgactggtaaaaacaaagcagaagctgctgaacaatttggtgatgagcaagttcacatttggcgtcgttcatacgatgtattgcctccagcaatggatcgtgatgatgagcactcagcacacactgaccgtcgttacgcttcacttgacgattcagtaattccagatgctgaaaacttgaaagttactttggaacgtgcccttccattttgggaagataaaatcgctccagctcttaaagatggtaaaaacgtattcgtaggtgcacacggtaactcaatccgtgcccttgttaaacacatcaaacaattgtcagacgacgaaatcatggatgttgaaattccaaacttcccaccattggtattcgaatttgacgaaaaattgaacgttgttaacgaatactacctcggaaaataagctgagataagtagttatcattaacaattaaaaagttgacttcggtcagcttttttcttttactgaaaataaatgtaaatagtggtcagaaaagtcagtcaattcagtaatttttccttgactttcaagttggaaagatgtatcatattaaccaagatacatcgaaaggaaatgagtcaaatgacattcgcaactacaactgttttgctattgcgtaatgagggctagtgcaaaagcattagtcctgtttggcttaccaagcgggaggtaaaaacatctcgcttgggtttccgagtgagatgtttttttactactatcgtttttacttttagaaagaggattgtctatgcgtaaagttgaattttttgatacaagtcttcgtgatggggaacaaacacctggagttaacttctcaatcaaagaaaaagttgccattgctaagcaacttgaaaaatggggaatttctgtaatcgaagcaggtttccctgcagctagtccagattcatttgaggcagtaaaacaaattgcagaagctatgacaacaacttctgttactggtttggctcgttcagtaaaatctgatattgatgcttgttatgaagctttgaaagatgctaagtatccacaaattcatgtctttatcgcaacaagtccgattcatcgtgagtttaaattgaagaaatcaaaagaagaaattcttgaagctgtaaaagaacatgtgtcatatgcacgttcaaaatttgaagttgttgagttttctcctgaagatgctactcgtactgagcttgatttcttgactgaagttgttcaaacagcagttgatgctggtgcctcatatattaatattcctgatacagttggctttacgactccagaagagtttgcacgtatttttgatcacttaactgaaaatattaaatcagatcataaagttgtctttggtgttcactgccacgatgaccttggtatggcaactgcaaatactttgacagcaattaaacatggtgctggacgtgttcagggaacagtcaatggtattggtgagcgtgcgggtaatgttgctcttgaagaagtagctgttgctttgaaaattcgtgaagacttcttccaagcaagttgtgatattgttttgaatgaaactatgaatacatcagagcttgtttctcgcttctcaggtattccagttcctaaaaataaagctgttgttggtggaaatgccttctctcatgaatcaggtatccaccaagatggtgttcttaagaacccacaaacttatgaaatcttcacaccagaattggtaggtgtgaagagtaacagtcttcctcttggtaaattgtcaggacgtcatgcctttgttgaaaaattgaaagaacttgagcttgactttgttgaagaagatatcaaaccactctttgccaaatttaaagtcttggctgggaagaaacatgatattaccgatgcagacattcgtgcccttgttgctggtactagtgtagataatccagaaggtttccacttcgaagatcttcgcttgactactaatgctgatgaaacaatcactgctacagtaagcttggctaatgaagacggtgaatctgtagaatttttggccaatgggcaagggtcagttgaagctattttcaatgctattgacaaattcttcaaccaaacagttcgcttgacttcttataatattgacgctgtaactgatggtattgatgcgcaagcgcgtgtacttgtaactgttgaaaatgtagatacagatactattttcaatgcatctggtttggactttgatgttttgaaagcatcagcaattgcctatatcaatgctaatacattggttcaaaaagaaaatgctggtgagatggcacgtaaggtttcttatcgtgaccttccataagccaaagaggagttaaacatgacaaagaaaatcgtaacactttcaggtgatggaattggacctgagattatggcagcgggtcttgaagttcttgaaaaagtagcttcaaaaattggatttgattatgacgttgatgctaaaccatttggtggtgctggtattgatgctgaaggtcatccacttcctaagtcaactttggatgctgctaaatcagcagatgctatcctcttggctgcaattggtggaccaaaatatgacaatgcgccagttcgtcctgaacaaggacttttggccattcgtaaagagctgaatctctttgctaatatccgtcctgtccgcatctttgatgctttgaaacacttgtcacctcttaaacctgagcgtatcgaaggagtagacttcgtcgttgttcgtgagcttacaggtggtatttactttggtgagcatattcttgaagaagataaggctcgtgatatcaatgattattcagcagatgagattcgtcgtatcatgcgtcgtgctttcaagattgcccaaggtcgtggcaaaaaggtcactagcattgataaacaaaatgttttggcaacttctaaattgtggcgtaagattgctgatgaagtttctttggagtttccagatgtaactcttgaacaccaactcgttgatagtgccgcaatgattatgattaccaacccagctcgttttgatgtggttgtgacagaaaatctttttggagatatcttgtctgatgaatcaagtgtccttccaggaactttaggcgttatgccatctgccagtcattctgaaaatggtcctagtctttatgaacctatccatggttcagcaccagacattgccggtcaaggtattgccaacccaatttcaatgattttatcagtagctatgatgttgcgtgaaagtttcaatgaaactgaaggggctgaattgattgaaaatgctgttgataagaccttgaaccaaggcatcttgacacgtgatttgggtggtcaggcttcgactgctgaaatgacagcagctattattagcaatctctaaactcatgacactaaaactagtgttactcagtgttttgttggtatggaatctccttgttttatgtgcttatggacttgataaaagcaaggctattcgacataagagacggatttctgagaaggcattattattgcagactctgattttcggtggtattggtgcttttctaggtggaaaactttttagacataaaattaacaaatggtattttaagctatgttggcttatgggaattgttattgatgtcgttattttataccttattctaacaagactttcggattagctaatccttagattatatttggagtattttatgagcggaaaatcaatttttgataaactttgggaacgccacgtcgttactggaaacgagggcgaaccacaattgatgtatgtagatcagcattatattcacgaggttacaagtccacaggcctttcaaggacttcgtgatgctggacgtaaagttcgtcgcccagatctaacttttggtacgacagaccacaacgttcctacagttgatatttttaacattcgtgaccttatttctaaaaaccaaattgatactttggcgaaaaacgtcgaagaatttggtattgatgcggctacccacggtactgctcgtcaggggattgtccatatggttggtcctgaaacaggtcgtagtcaacccggaaaatttgtagtttgtggggatagtcatacggctacgcacggtgcctttggtgccattgcctttggtattggtacatctgaggtggaacatgtctttgcgacacaatgtttgtggcaagtaaaacctaagaaaatgaaggttgaatttgttggtaaaccacagccaggtgtttattcaaaagactttattcttgcacttattgcacgctatggcgttgatgctggtgtaggatacgcggttgaatattgtggtgaagctattgatgccctttcaatggatgaacgcatgactatctgtaacatgtctattgaatttggtgctaagatgggtcttatgaatccagaccaaaaaacttatgattatgttgaagggcgtccttgcgcacctaagggtgagaagtttgaagaagcagtagctgactggaaaaccttggtctcagatccagatgctgaatacgataaagtaatcactattgatgtttcagaattggcacctatggttacatggggaactaaccctgaaatgggtgttgagtttgatcaaccattcccagaaatcaaagactttaatgatgaacgtgcttacgagtatatggatgttaagcctggcgaatatgctaaagatatcgatcttggctatgtctttattggttcttgtactaacgcacgtcttagcgaccttgagttagctgctaaattcgttaaaggaaaacatatcgcaccaacattgacagctattgttgttccaggttcacgtccagttaagaaagaagctgaacgtcttggtttggataaaattttcttggatgcaggatttgaatggcgtgatccaggttgctcaatgtgtcttggtatgaacccagaccatgttccagaaggcgttcactgtgcatctacaagtaaccgtaactttgagggacgtcaaggatatggagctcgtactcacctttgtagtccagcaatggcagcagctgcggcaatcgctggtaaatttgtagatgtacgctatatgccagaagttcaagcataagggagaagataatggaaaaatttaccgtctatacagggaaatcagtacctttgatgaatgataacatcgatacggaccaactcattcccaaacaattcttgaaagctgttgataaaaaaggtttcggtaagaatttgatgtttgaatggcgttatcttaatgatgactacgaagaaaatcctgatttcgtcttcaataaacctgagtatcgcgatgcgactattttggttactggtgataactttggttcaggatcatctcgtgaacacgctgcgtgggcattggaagactatggtttccgctgtgttatcgctggatcattttcagatatccactataacaacgaattgaagaatggtatgttgccaatcgttcaacccttggaagtacgtcaaaaattggctgcccttcctgcgggtgaagaaatcacgattgaccttccaaaccaagtcattaaatcttcagctggagagtttccatttgatattgatcatgagtggaaacgtaaattggttgaagggcttgatgatattggaatcactcttcaatatgaagatttgattgctgcctatgaaaaacaacgcccatcatattggcaataagggactaagttgtttttctaaactttgatattcaatcttgctatcaaaagtaatgatgtgttagtaaaaaaataatgatcacttaaaagaatgggataaggacaatgtctaaaatattgttctatctcattctttttgtttgaaacagttaatatggtagaggcgtttttactagtagcgtatgctataatagaaagatagaaaggaggccttcatgtttgcacaattggatacaaaatccgtctatagtttcatggatagtgtagtagatttgaacagctacgttgcgcgtgccaaagagcttggctatcaagcccttggtttgatggatcgtgacaatctctatgctgcttatcattttgcccagcttgcaagtagaaacggtttacgtcctttgattggtatggaagctaatctattttacgagggaagaaaaattccttttcgcctgttagctaaaaataatcagggctataaaaatttgatgaagttggcaacagagctctcctcaggacagcgtgagtttacagctttctcggattatcttaatgatattgccctcatccttccaagtgaagactgggagccagggatgactcttggttcagaggttttcattggggtaaggccagaagatgcgggtaaagagtttgattatcctgtagttcccttacatacagtgcgttactttgagaattcagaccgctcgacgattcagatgttgcatgccatctcgcaaaacgtttccttgtcagaggcctctatttgtcctatgaatcagcttcttttctcgcctcaagaaatcgaaagtgcgtatagtgatattccagaggctttgaacaatttggagcaacttgtttcagacattacttatcaatttgatacggatttgaagcttccacgttttaatcgagatatgcctgctgttgaccaattacgtcaattagctcaatctggattggagtctaaaaagttaacatcaccagtttatcaggaacgtttagacaaagaattgtctatcattcatcagatgggctttgatgattatttcttgattgtctgggacttgttacgctttgggcgtagccgtggttattatatgggaatgggacgtggatctgctgcaggaagcttggtggcctatgttcttgacattactggaattgatcccgttaaaaatgacttgcttttcgagcgtttcctaaatgaagagcgttatagcatgcctgatattgatatcgacttgcctgatatctatcgaagcgagtttcttcattatgttagggaccgttatggtagtaagcactctgctcagattgttaccttttcaacctttggagccaagcaggctattcgagatgtttttaaacgttttggtgctaaggaatttgaactgtcccaactaagtaaaaagatttcttttcgtgataacttgacctctgtctatgagaagaatatgtcattcagacagctgattaatcagagacaggaatttcagagggcatttgaaattgctaaggctattgaaggccagccaagacaaacctcaattcatgctgccggtatagtgatgagtgatgatgacctgactaatcatattcctctaaaagctggtgaggatatgatggttactcagtacgatgcctccgcagtcgaggccaatggcttgcttaagatggatttcttgggcctccgtaatttgacctttgttcaaaaaatgaaggagaagcttgaagaagagcagggcatcactattgatatcaaatccattgacttggaagatccacagaccctagcactttttgccagtggtaagaccaaggggatttttcagtttgagcaggcgggtgccataaacctccttaaacgaattaaacctgctaagttcgaagaagtcgtagcgacaacctctcttaaccgtcctggagctagcgattatacagataatttcattgctcgtaaatacggtaaggaaaaagtagatctcattgatccagtagttgcaccaatccttgagcctacttatggcatcatgctctatcaggagcaggttatgcagattgcccaagtatttgcgggctttacactcggaaaagccgatttgcttcgtcgagcgatgtctaaaaaagatgccaataaaatgtccaagatgtccgaagagttcatggaaggaagtcgtcagttaggacgtgacccacagattgctgaacgcctctttagtatgatggctaagtttgcaggttatggctttaatagaagtcatgcctatgcctactcagctttggcctttcagttagcctatttcaaaacgcactacccacagatattctatgacgtcatgttaaattattcgtcaagtgattacattaaggatgcaattgaaaatggcttctctctagctagcctcgatattaataggattccctatctggacaagatttcaaatggaaagatcgtattaggtcttaagactatcaaaggcttgccaagagattttgccctttggattattgaggatcgcaaacaaaatggcaaatacatttctatagaagactttttaacacgtattcctagtaaatatcagaaagtcgatattttgacacctctcatccagattggtttgtttgatatttttgaaccaaaccgtcagaaaatcattggcaatttaaacaacctctttacttttgtcaatgagttaggaagtttgtttgcagagtcctcttattcttgggttgattatgaagactatagccagacggatcgttataatttagaacaggagttactaggagttgggcttagtcctcatcctttacacctagctcaaaaaatggcctctcgtccctatcaaccaatttctgatttgacggttaatactaaggcgacggttttggttcagctagagtccgttcgaattatcagaactaaaaaaggtgatcagatggcctttctgaacgtcactgatgggatcaataaacttgatgttactctattcccagaaacttatttctatcataaggataaattaagtgaaggtggtctcttttatcttgatgggcggacccaggagcgtgatggacgcattcagttaattttgtccaacatggaggaagctagtacggagcgtttctggattttacttgagaatcatgatcaggacttagacgtttctcaaatcttagctaagtatcctggaaacatccctgtaattattcgttatcaaggaagtaaggaaaccatcgttagtcaaagatatagagtatccaagaacgaggaacttaatcaggaattagcaccttatgtgttgaaaacggttttacgataaaaaaaacaataaatcttttcaaatttaaagccatttagaattctttatgttataatgaaaatgttaaatatataaaaggagtatcaggaataatgaaacgtattgctgttttgactagtggtggagatgcccctggtatgaacgctgccgctcgcgcagttgttctcaaagcaatttctgaaggaattgaagtattcggcattaaccgtggatacgctggtatggttgaaggagatatcttccaacttgatgctaaaggcgtagacaacatcctaagccgtggtggtactttccttcagtctgctcgctatcctgagtttgcccaacttgagggtcaacttaaaggtattgagcaacttaaaaaacatggaatcgaaggtgtagtagttattggtggagatggttcttaccatggtgctatgcgtttgactgaacatggtttcccagctgttggtcttccaggaactatcgataacgatatcgttggtacagactatacaattggttttgatactgctgttgcaactgcaacagaagctatcgataaaattcaagacactgctttcagtcacggacgtacttttgtcgttgaagttatgggacgtcacgctggtgatatcgctctttgggctggtatcgcttctggtgcagaccaaattatcgtacctgaagaagagtacgacatcaacgaagttgtccgtaaagttaaagaaggttacgaatcaggtgttaaaactcaccacgtaatcgtacttgctgaaggtgttatgggtgctgaagaatttgcagctaaaatgaaagaagctggagatacttcagatcttcgtgcaacaaacattggacacgtggttcgtggtggttcgccaactgcgcgtgaccgtgttcttgcttcatggatgggtgcacatgcggttgacctccttaaacaaggtattggtggtgtagctgttggtatccacaatgaagagcttgttgaaagcccaatccttggtacagcagaagaaggcgctttgttcagtcttactgaagacggtaaaattatcgtcaacaatccacacaaagctcgtattgactttgcagaccttaaccgttcattgtctaacttgagctaatctcagttacttaaattattgttaatccgtcgctaaggcgacaaaaaatataagggagtttttatttatcatgaataaacgtgtaaaaatcgttgcaacacttggtcctgcggttgaaatccgtggcggcaaaaaatttggtgaagatggttactggggtgaaaaacttgaccgtgaagcatctgctaaaaacattgctcaattgatcaaggaaggtgccaacgttttccgtttcaacttctcacatggtgaccacgctgaacaaggtgaacgtatggatgtcgttcgtatggcagaagaccttgctggtcaaaaagtaggtttccttcttgatacaaaaggacctgagatgcgtactgaattgttcgaaggtgatgctaaagagtatgcatacaaaactggtgaacaaattcgtgttgctactaaacaaggtatcaaatcaactcgcgacgttatcgctttgaacgttgcaggtgcacttgacgtttttgacgatgtagaagttggtaaacaagttcttatcgatgatggtaaacttggtcttcgtgttgtagacaaagatgctgaaaaacgtgaattcatcgttgaagttgaaaatgatggtatcatcgctaaacaaaaaggtgtaaacatcccttacactaaaattcctttcccagcacttgctgaacgtgataacgctgatatccgttttggtcttgaacaaggtcttaactttatcgctatctcattcgtacgtactgcaaaagacgtacaagaagttcgtgctatctgtgaagaaactggtaacggtcatgttcaattgttggctaaaatcgaaaaccaacaaggtatcgataacatcgatgaaatcatcgaggctgctgacggtatcatgatcgctcgtggtgacatgggtatcgaagtaccattcgaaatggttccagtttaccaaaaaatgatcatcactaaagtaaacgctgctggtaaagttgttgttacagctactaacatgcttgaaacaatgacagaaaaaccacgtgcaactcgttctgaagtatctgacgtatttaacgcagttatcgatggtacagatgctacaatgctttctggtgagtctgcaaatggtaaatacccagttgaatcagttcgtacaatggctacaattgataaaaacgctcaaactcttcttaaagagtatggtcgtcttgattcatcaacatttgaccgttcaactaagactgaagtagttgcatctgcagttaaagatgctactaactcaatggatatcaaacttattgttgctcttactgaatcaggtaacactgctcgtttgatttctaaataccgtccagaagctgatatcttggctgtaacattcgatgaaattactcaaaaatcattgatgcttaactggggtgttattccagtagttactgaaaaaccaagctcaactgatgatatgtttgatgttgctgaaaaagttgcattggaatcaggtcttgtagaatctggtgacaacattgttatcgttgctggtgttccagtaggtacaggtggtacaaacactatgcgtatccgcacagtaaaataatttaagtagtacttaaatagaaagaaggtctttggatcttctttttttggctctataatcgatttagtaggttaaactattgaagagattatagagcttttttcgtaggtaggtaaatcaattggataataataacaagagaagaatatcatatttattccaaatggtttaaagcaagatggctgatttggtttgtattttcaacagatttagttctaagtgtcatatggcttagaaggtattaagagaagagggaaattatcttttcaaagaaattttgcttttcttgaaaacaacaggataaaaaatgtcgttaaataggcttctaaactatagttaagatggttataagctataatttttagaaggactgagttgataacaaaccattttaatttcaataatgacttactaatttaaaagttctaatgaattattaattttgaaaatcgatttttgaaaaaaataaaatcataagtttctttttactgacaattctaaaaataaataattataaaattattaattgaaacgtttataaaaatagtgatatctataatcattctactgattacatgattatttttaagtgaaccttataaaaaaattgaaaataagagcatttcttttcacaaatattaggaattttgttaaaatatttaacgattagtatttttaaatacttttaatctcattgaggggtgagatacttaatagtataagtgtggaggattaccaaagtgggtaaagatttatttaatgatcgtataagtcgattttcgattcgtaagctgaatgtaggggtttgctccgttcttcttggaactctggttatggttggtactgctagtcaagtatctgccgatgaaacagctaaccaagtccaagcaggagatgtagctagcactacttctacagtgagtgatgagacatcttctcagaatgctgttgctgctcaagcttcgacggaagtcgcaaatttcttatcaagttctgagactaatagtcagtctcaaaccgtttcaaatgctagcgcagctacttctgaaacgtctacaacacaagcttctagtgagacaacatctcaagcagcttcgtcaacgtcagcaactactgcagcatctaccactagtgttgctggctctacaagtgtaggcaatactacgggagtttcaacgacagcctctgttacatcagcatcatctgagacacctgcttcagaaacagcatctgaagcacaaggtgtggacgttcaagcagaagcttctacaacgaatgctctttcaagtggagccgaagcgtctgctgtagagcaacctgttgtaacagcagaaacttctggtcgacgtcgtacacgtcgtgcattaggtgatcctaatgacgaaagcttgattggggatgatgttgaagatgcaacttcaactccaaaagttgaaaaaccaggctttacaacaaatgttgatgccaaatctatggctagccaaatctcatggttggactttggagatgtagctaactggacaggaactactacagtactagttcctaaaagtgaagttaaaccaactgagaacttagaagaaaaattggctcttcaagttgggtctacctataccaaggaaattatgcctggttatgtagttactgtaaaagtcaaatccttgaaacctttccaagcgactgaaatctataagaaacggatggaaaatcaaggggctacagaagctgaaaaagcaacctatgatccaaatgcaaaaaatggttatgtaagtggagtcacttcaaatgctgctaggcaagcttttaacaatggtgaagaggccaaaatcgttgctgatgcccaaaataattggactgaaatcagatttgagaatattgatacgaaaaccaagaagactaccataagttcagctttgaatggtggaaatattggagttcagtttgaaatctctgcaaccttccgtggtaagacagttaagccagctattgttatggctgatggggagtctgctaacccaggtgaattagttatgtttactaccaatggagaaggttggcagcatattggagaatggaaaaagtttaccagaccaactacttctgtaacatattcaccacaagatactgaaaatctttttggacctaatcctaaatttaataataccaacttaaaccaacttcgtagatctactcaagttggaccagaaaagaaaccagtagcttggaagtattttggaaatcctgacaaagttacaggtggtctaggaaccggtatctttggaccaaacatttctgaaggtaattatactgttccaatcgttatgacgcgtggtgcctctgaagttggactttatgtcgcttcaggtggtaaacagtcagcaatgctaggattcttcccaattgatgaaggggacgctcctgagtcatacggaaaagctatgcataccattgcaactgtagatggtataactggtgctaaagtaaatcaaccatatattggtaatgtgagcccagatatggatgagaatactgttcttgactggttcggtgatgataaggcaactacggccgatgaaggaattgaccaattgcttccagatgagcttaaaggtacaaccaatgagatgatcaagatggatcgtacacgcccaggtaactacaagctgtcaatagaagcccatacagatggagcttcagaagcttatatctacggttggatagactttaaccaaaatggtacctttgatgaagatgaacgctctgatcttgcaagaatcacaaatgacggtacagttgagttgacttttgcaaatagcaagacttatatcgaccctagcgttaaagaactaggtgctcgtgttcgtattgccaagaaagctaacgagattgagagcccaactggtatggccctctcaggggaagtggaagacttcagaactcaaattacgcacccaccaaaaggggaattcaaggaaacaagtggtcctcaaggggcgaagcaaactgcaactgtaacctttacagcacgtggagaacacaagtatgagcttaattctagtgccgttattgacgaaacggtagaaccatacatcgttgataaagatggcaaccgtgctactcttgatggggacggttactatgtcgttccaggacaaggtaagtacaagattactgccaacggtaaagatgtcgatgttgaatttattcctgaagataacttccttggaacagctgatggtatttctatccgtcgttcagataacaacggttatgatactggttggtcaacaaaattcccagatcaagaaccaaacattaatggtcagttgaataccatggatggtcaatacgttccaacagtcactccaattgaaatcgaaggagttgacaaaacttcgacggatgttcaaggggcgactcaaaaagaaactccgacctttaacacaactgagactaactcaaatggtgacaagattgcaatcactccaagtgcagaatatcctgctaagttggtggatcctgccacaggtctcactactgatgcgccatctgtaacagttgaaggggaaggaacttatacgattaatccttcaacgggtgaagtaaccttcactccagatccaagctttactggtacagcaaaaggtgtggaagttacattgtcagcgccagttggtagaaacaaagatggtaagatccaacaggattacatcaagactgcaacagctaagtacacaccaacagtcacaccaatcacagtgactcctacagacaaggtttctgcggatgttcaaaacgttcctcaaacccaaacaccaacctttgatttgagtagtgacaagactgcgaaaattacaagtaaaaaattggtggatccagcgactggtcaaccgactgatgaaacaagtgtgacagtagcaggtgaaggtagctatactatcgatccaacgactggagcggttacatttactccagagaaagactttgttggaactgctaaaggtgttacggttcaagcgactgcgacgattaccaatgcaaacggtaagactgcaaccattacatccgatgcaacatacacaccaacggttgtagcagctgttccaacagcaagccttgcaacttcaaaagatatccaaggtgcgactcaaaccggtaaaccaacctttgcaggaacaactgttcaagtaaatggtgaagataaagctattacgattaaagagaatagctacacacttttggataatgatggcaatgaagtgacgagtgctccagcatatgctgctgatggtacaactgaaattggtacttattcaattgatcaagcaactggacaagtaaccttcacaccaacggataaatcatacacaggtgtagtgacacctgctaaggttcaagcggaaagttcaaacggtatcaaggtggatacaacatacacacctgaaatcgttccagtaacaccgacagcaacaccagctgaaacagaagatatccaaggtgcaacgcaaactggtaaacctgaatttaagggcggaactgtaacagtagatggcgttgagaaaacagtagcgattaatgaagctgttccagcgaccttcgatgatggttcaacgactaagacagtagacggcgttggtacttacacagtagcagcagacggaacagttacattcgtacctgaaaaatcattcgttggaactgcaccagcagtgacggttgttcgtgaagataagaacggaaccaaagcttcagcgacatataccccaactgtaactccggtaaggccaactgcagcaccagctgaatcaacagatgttcaaggtgccactcaaacaggtaagcctgtatttactgagggtaatagccgtgtgccgatgaatgatgatgttgccgcaacatttgacgatggatcaacgactaagacagttgatggtgttggtacctacacagtagcagcagacggaactgtgacatttgttccagaaccaaactttacaggaacagcacctgcagttacagttgttcgtgaagacatgaatggtactaaagcttcagcgacctacacaccatctgtaactccaattacaattactcctaaagacaaggtatctgaggatgttcaaaatgttcctcaaactcaaacaccaacttttgatttgagtaacaataagactgcccaaatcacaagcaagaaattggtagatccagcaacaggtcaaccaacagatgaaacaacagtaactgttgaaggtgaaggaacttatacaatcgatccgacaacaggagcagtgactttcacacctgaaaaagacttcgttggaactgcaactggagtgaaagtccaagcgacagcgacgattacaaatgaagatggtaagacaacaaccatcacttcagatgcaagttacacaccaacagttgtagcagctgttccaacagctaaaccagctacatctaaagatatccaaggtgcgacacaaactggaacaccaacctttgaaggtgcaactgttcaagtaaatggtcaagataaagctattacaatcaaagataatagctacacacttttggacaaagatggtaatgaagtggcgactacgccagcctttgctgaagatggtacaactgaaatcggtatgtactcaattgatccagcaactggacaagtgaccttcacaccaactgacaaatcttacacaggtaaagtaacgcctgttaaggttcaagctgaaagctcaaacggcatcaaggtggatacaacctacacacctgaaattgttccagtaaccccaacagctacaccagctgaaacaactgatattcaaggtgctactcaaacaggtaaacctgaattcaagggtggaacagtaacagttgatggcgttgagaaaacagtagaaatcaatgaagatgttccagcaacatttgatgatggctcgactaccaagacagttgatggcgttggtacatacacagtagcagcagacggaaccgtaactttcgtcccagagaaatcatttactggaacagcaccagctgtaactgttgttcgtgaagataagaacggaaccaaagcttcagcgacttacacaccaactgtgacaccagtaacaccgactgcggaagatacaacatctactggtaaacaaggtcaaactcaaacaggtaagcctgaatttactgaaggcaacagccgtgtgccaatgaacgatgacgttccagcaaccttcgatgatggttcaactactaagacagtagatggcgttggtacttacacagtagcagcggacggaactgtaacctttgttcctgagaaatcatttactggaacagcaccagctgtaacagttgttcgtgaagataagaatggaaccaaagcttctgcaacttacacaccaactgtaactcctgtcacaccgacagcaacaccagctgaatctactggacctcaaggtctagttcaaactggaactgtaactttcactgaaggtgatgaagtagctccaattaacaaggattcgattacacttcttgatgaaaatggtcaacctgcagcatcagtagaagcgaaatcaccagcaggtgatgtgatcggtaccttcacagttgataaagaaactggtgttgtgaccttcacaccaacggataaatcttactcaggtgatgttgttccggttaaggttcaagcagctgatgcaaatggaactacagttgaaacaacatacacaccgaagattactccagttgttccaacttccgaagatgcaacatcgactgatatccaaggtgccactcaaacaggtaaaccaaccttcacagaaggtaatccaaatgttccaatcgacgaagatacacctgctactttcgaagatggctcaacgactaagacagtagatggtgaaggaacatacactgtttctccagatggaaccgtaaccttcgtccctgaaaaatcattcactggaactggttcaggcgtaacggttaaacgtgttgataagaacggtactgaaatcacagctaaatacacaccaactgtgacaccagtaactccgactgcggaagattcaacatcaacaggtaaacaaggacaaacccaaacaggtaagcctaaatttactgaaggcaacagccgtgtgccaatgaatgatgacgttccagctacttttgatgatggttcaacaaccaagacagtagatggcgttggtacttacacagtagccgcagacggaacagtaacctttgttcctgagaaatcattcactggcgaagcaccagccgtgacagttgtccgtgaagatatgaatggcactaaggcttcagctaagtacacaccaactgtaacaccagtaattccaactgcaacaccagcagaatcaactggtcctcaaggtttggtgcaaactggaacagtaaccttcactgaaggtgatgaagtagctccaattaacaaggattctattactcttcttgatgaatctggtcaaccagctgcttcagtagaggcgaaatcaccagctggtgatgtaatcggtaccttcacagttgacaaagaaacaggtgttgttaccttcacaccaacggataaatcatactcaggtgatgttgttccggttaaggttcaagcagctgatacaaatggaactacagttgaaacaacttatacaccgaagattactccggttgtcccaacttctgaagatgctacatcgacagatattcaaggtcaaacacaatctggtaaaccaaccttcaccgaaggaaatccaaatgttccaatcgatgaagatactccagctacctttgaagatggttcaaccactaagacagtagatggcgaaggaacttacactgtttctccagatggaaccgtaaccttcgttccagaaaaatcattcactggaactgcttcaggcgtaacggttaaacgtgttgataagaacggtactgaaatcacagctaagtacacaccaactgtgacaccagtaactccgacagctgcaccagctgaaacaactgatatccaaggtgcaactcaaactggcaaacctgtattcactgaaggcgatagccgtgtgccaatgaacgatgatgttccagcaactttcgatgatggctcaactacgaagactgtagatggtgttggtacttacacagtagcagctgatggaaccgtaacctttgtaccagaaaaatcatttgttggaactgcaccagccgtaacggttgtccgtgaagatatgaacggaacaaaagcttctgcaacttatacaccaaccgtaactcctgttacaccaactgcagaagatacaacatctaatgacaaacaaggtcaaacgcaaacaggtaccccaagcttcacacctggtaatccaaatgttccaatggatgatgatacacctgcaacatttgaagatggctcaactacgaagaccattccaggtgaaggaacttacactgttgctccagacggaaccgtaacctttgtaccagaaaaatcattcacaggagaaggttcaggcgtaacggttaaacgtgtcgataagaacggtactccagttactgctaagtacacaccaactgtgacaccagtaactccaacagcaactccagctgaatcagaagcccctcaaggtgtggttcaaactggaactgtaaccttcactgaaggtgacccagttgcaccaatcgacaaggataccattactctccttgacgaaattggtcagccagcagcatcagttgatgcgaaatcaccagcaggtgatgtgatcggtaccttcactgttgataaagaaacaggtgttgtgaccttcacaccaactgataaatcttactcaggtgatgttgttccagttaaggttcaaggtaaagatacgaacggaacggttgctgagacaacttacacacctaagattactccagttgtaccaactgctgatcctgcaacatcaacagacatccaaggtcaaacacaaacaggtacaccaagcttcacacctggtaaccctgcaatcccaatggatgatgatgtaccagctactttcgaagatggttcaaccactaagacagtaggtggtgaaggaacatacaccgtttctccagatggaacagtaacctttgtcccagaaaaatcattcactggaactgcttcaggcgtaacggttaaacgtgttgataagaacggtactccagttacagcaacttatacaccaacagtaactccagttacaccaactgctgaaccaacaacatcaacaggtaaacaaggtcaaactcaaacaggtaagcctgaatttactgaaggtgacagccgtgtaccaatgaacgatgatgttccagcaaccttcgaagatggcacaacgactaagacagttgacggtgtcggtacatacacagtagcagcggacggaactgtaacctttgttccagaaaaatcattcgtcggaactgcaccagcagtgactgttgttcgtgaagatgtaaatggtactaaggcttcagcgacttacacaccaaccgtaacttcagtcacaccgactgcaacaccggcagaatcaacaggacctcaaggagtagttcagacgggaactgtaacctttactgagggtgattcagttgctccaattgacaaagatactattacccttcttgatgaaaatggccaaccagcagcggcggtgtttgcgaaatcaccagcgggcaatattattggtaccttcacagttgataaagacacaggtgtcgtaaccttcacaccaacggataaatcttattcaggtgatgttgtcccagttaaagttcaagcagctgatacaaatggaacaacagtagaaacaacatacacacctaagattactccagtcgttccaacatctgaagatgcgacatcaacagatatccaaggtgcaacacaaacaggtaaaccaagcttcaccgaaggaaatccaaatgttccaatcgatgaagatactccagctactttcgaagatggttcaacaactaagacagtagatggtgaaggaacatacactgtttctccagatggaacagtaaccttcgtcccagaaaaatcattcactggaactgcttcaggcgtaacggttaaacgtgtcgataagaacggaactgaaatcacagctaagtacacaccaactgtgacaccagtcacaccgactgcaactccagcagtatctactgacatccagggtgcaacacaaactggtaaacctgtattcaccgaaggtgatagccgtgtgccaatgaacgatgacgttccagcaacatttgacgatggttcaacaactaagacagtagaaggcgttggtacttatacagtagcagtagacggaacagttacattcgtacctgagaaatcattcgttggtgaagctccagcagtgacagttgttcgtgaagatgtgaacggaaccaaagcctcagcaacctacacaccaactgtaactcctgtaacaccaactgctgagccagcaacatctacagacattcaaggtcaaacccaaacaggtaaaccaagcttcatgcctggtaacccaagtgtaccaatggatgatgatgttccagcaacctttgaagatggatcaactaccaagactattccaggtgaaggaacttacaccgtttctccagacggaacagtaacctttgttccagaaaaatcattcacaggaacaggtacaggcgtaacagtgaaacgtgttgataagaacggtacagctattacagctacctatacaccaaccgttacaccagtaacaccaactgcagaatcagttacttcaattggtaataagggtcaaacgcaaacaggtaagccaagcttcactgaaggcgatagccgtgtaccaatgaataaccaagttccagctacctttgatgatggttcaactaccaagacgatttcaggtgttggtacttacacagtagctgcagatggaactgtaaccttcacaccagaacctgaatttacaggaactgccccagcagtaacagttgttcgtgaagatgttaacggaactaaggcttcagctacctacacaccaactgttcttccaatcactaagtttgtcgataaagaaggtaaggaaatcccaggatatccgacagttgatggtgaacagccaaaagttgagatcccaggttaccgcttcgtagaaactaagaaattacctaatggtgatatcgaacatgtctatgagcaagtaacaacatcatatgtagatgaaaatggtactccaatccctggttatccaaccgaagatggccaacaacctaagaaagacatccctggttatgaatttgtgaagacagttgtagatgaaaagggtaatactcaacacatctacaaacaaattgtgactccaacaccagtgccggatacaactccgacaccagagccacagccagctccacaaacagaagagcctaaggctccagtacttccagaaacaaaagaagaagctcactttatcaatccaactgataagacagcccaacttccagaaactggtagtgaagattcaaaccttgcaatctttggtttggcaagtcttctagctggatttggactctatggcgcaaaacgacgcaaacgttaagatgatttaacggtcgtataggaccttaagaatccagatttcaattaaaatagacctcatggtatttgccatggggtctatttgtatggtccagcctgctgtttttcaagtcgtcatgattgactttgctctctaggaagcgtaatctagaccttaggtaaaggattataaggaggtccctcgatgattgaagtaacttatttaaataccgctaagcaagaaaaacacacttcctttgaagattacaatgaatttgtcagagcccagcaagcttgctggattgccttaccagattcaacgccagtcacaaaggtaacaataaacggacatgatattggctacaagggacaatatggtgacctttacttttatattatgaagctagacttggcacaatatcagtaataatataataataagggaaaagaatcagacatcgtgttctggttctttttctttgagcaagctaatttttataaattaagaatattgctaattgactgaaaatgacttacaatagaaaggaagaatttatagaaggagacacatatgaaaaacaagcgtttaatttggactttggttttcttagctatcttgacgctcggttctattggtacagatcttttcaaaaaagaacaccaagatgccaataaggtcgtcaaagtagggatcctccagttcgtgactcacgacgccctggatcaaatcgagaagggaattgaggatggccttaaggaagctggttataagggggacaaggttaaaatcaccctcctaaatgccgaaggagaccagtctaaaattcaaaccatgtctaaacaattggttaatgacaagaacgatgtcgttatcggtattgccacaccagcagcacaggggctagcggcagctaccaaggatattccagtcatcatgggggctatctcagaccctgttggagccaaattggttaaggatctcaagcatccggaaggcaatgtcactggtacctctaaccaagtgccaatcaagcagacagtagaattggtcaaatcactgacaccaaatgccaaaacgattggtattctctatgcttcaagtgaggataattccaaatcacaggttgaaagctttaagaaatacgctgaaaaagatggcctgaatgtggtcgagtacgctgtaccatcaaccaatgaaatcaatacaaccatgtcagtcatgactggtaaggtagatgccatctggacgcctcaagataatactattgcttcagccttttcaacagtaatctcatcagccaaccaagctaagattccagtttatacgacggttgatactatggtgaaagaaggcggtttggcttcagtggcgcaaagccaatatgaactcggaaaggctacagctcgtagtgccgttaaggttcttaaaggtaagagagttaaggatgttcctgtagatgttatcgatgatggcacaccaacacttaaccttaaagttgctcaagacctcaacatcaccatccctgacgatgtgcttaaacagtcagacatcgctgttaaggctgataaataaggaggacttatgattatttcatctatttatcaggggcttttatacggaatcctaggtcttgggatttacatgactttccgtatcttggattttcctgatttgacaacagaaggttccttccctcttggtggggcagtagcagtaacccttatgaactttggttggaacccaatcttagcaaccttggttgccgtcttggcgggctgtggtgctggacttgtgactggtctcctctatactaagggagagattcctactattttggcagggattttggtcatgacctctcttaactcagtcatgcttatgattatgggaagagccaacctaggacttctagatatcaagactatccaagatttgcttcctttcagcaaggactacaatctcttgattgttggtctcattgctgtgaccattgttatcactgccttgattgcctttcttaacacgcgcctaggtcaagcttatattgccacaggtgataatagagacatggccaaatcatttggtatcaacacagacaatatggaagtgatgggtcttgttatctcaaacggtattatcgctctctcgggagccttgattagccaacaggacggttatgccgacgtttctaaagggattggggttatcgtcattggtcttgccagcattatcattggtgaggtcctttatgcgactaacttgactctgttggaacgtttgattgccatctgtattggttcaatcctctatcagttccttttgacagcggttattgctcttggctttaacactaactacctcaaactctttagtgcaattgttttggctatttgtttgatttcgcctgtcctacgccgaaaattctttaagggggtgaccttatcacgatgacagctattgtagaactcaaagatgcgactgttaaggtcaataacggttttgacaccgaaaaaacaatcctggaccatgttaatcttacccttagagaaggtgactttattaccattctcggtggaaatggtgccggaaaatcaaccctcttcaacgtcattgcagggacactcatgttgaccagtggtcagattttcatcatgggtgaagatgttacggctctccctgctgagaagcgtgctaagtacctctcacgagtcttccaagatcctaaaatggggacagctcctcgtatgactgttgcagaaaacctcttgattgccaaataccgtggtgaaaaacgagggcttaaatcacgccaaattcatctctacacagaggaatttcaaggtctgatcgaacgtatcagtaatggtttagaaaaacacttagatacaccagcaggtctcctttcaggtggtcagcgtcaggctctcagtctgttgatggcgacacttaaacgtcctgagctcttgctcttagatgagcacaccgcagccctggatcccaagaccagtgtagccctcatggagttgactgatgagtttgtaacaggtgaccatctaacagccttgatgattacccaccacatggaagatgccctaaaatatggcaatcgtctaatcgttatgaaggatggtcaaatcattaaagaccttaccaaggaagaaaaaggccaattggatatcacagactattacgctatgtttgagtaagcctagtctgactctaaattgtaaaataagccaaaaagttgtatacttaaagggtatgcaactttttgttgtggcctgtaaatcgacaaggagactgttcgcacgaacgttcagcttcttggaccgtctgtaaaaataggctctagaagagagtcaaactaaaaaggagaaaaacaagcatgagcgatattaaaattattgccctaggtggagtacgtgaaaatgctaagaacctctatattgttgagattaacgactctatctttatcttggatgctggtctaaagtatcctgaaaatgaacaactaggtgttgactttgtcatccctaacttagattacttgattgaaaatagagatcgtatccaagggattttcttaactcacggacacgccgatgccattggtgccctaccttatatcttgcaagacgtcaaagcaccagtttttggatcatcactcacaatcgagttagctaaactttttgtcaagaatgctggcgttaagaaattcaataatttccatgttattgacgcagaaactgaaattgaatttgaggatgctgaggtttcattcttcaaaacaactcactcaattccagaatcaatggggattgttcttggtactgaccaaggaaatattgtctatacaggtgacttcaagtttgaccaagctgcccgtccttactacaaaactgatttaggtcgtttggctgaaatcggacgtgaaggtgttttggccctcttgtcagactcagcaaatgcgacaagtactgaacaaacagcttctgaagcagaagttggccaagaaattgaccaagttattgccgatgcagaaggacgtgttattgttgctgcagttgcctcaaacttggtacgtattcaacaagtcttcgattcagctgctgatcacggacgtcgtgttgttcttactggttttgacgtagaaaatattgtccgcacagccattcgtctcaaaaaattgactgtggagcatgagaaacttattgtcaaaccaaaagacatgaacaagttcgaagaccacgagttgattatcctcgaaaatggtcgtatgggtgaaccaatcgatggccttcaaaagatggctgttggtcgtcaccgttacgttcaaatcaaggatggagatttggtttatatcgtaacaactccaagcattgctaaggaagccgtagtggcacgtgtcaacaacgctatctataaagctggtggaactgttaagatgattacgcagagccttcgtgtttctggacatgccaatgctcgagaacttcaattgatgattaacctccttcgtccacagtatctcttccctattcaaggggagtaccgtgaccttcaagcacatgcagagttagccttggaagttggtattcttccagaaaatatttatatcgttaaacgcggtgacatcatgcacttgtcagaggaccaaggttttcttcatgaaggagctgttccagctggtgatgttatgattgacggtaatgccattggtgatgtgggtaatatcgtccttcgtgaccgtaaggtcttgtctgaagatggtatctttatcgtagctatcactgttaacaagaaggaacgtaagattgtctctaaagcgcgtgtgaatacacgtggattcgtttatgtgaagaagagccgtgacattctccgtgaggctgctgacattgtcaatgctaccgttgaaaattacttggcaggagacagcttcgactggggtgaacttaaaggtgccgtccgcgacgatgtggctaagttcctctttgaccaaaccaaacgtcgcccagctatccttccagtagttatggaagttcgctaataactgactaaaacataagagtgtgagcgtgtcgcttgcaccatagacattgaggaaagtctcaacaagactttgttttaaaatcaaaagctggggtgtcccagcttttctaacattaagaaaggaaaatacaaatggctttttttcaaattgaatactcatcagatgttctaggacaataccgccaagtggatgtcatctatccagatcgtgatcagattgctgaaacggaaagtgatacggacatcccagttctctatctccttcatggcatggggggcaatcataattcttgggccttccgtaccaatattcagcgtctccttcgtaagactaatctcattgttattatgcctaactctgaaaatggctggtatacaaataccaattacggggttaagtattacgatgccattgctaaggagcttcctcaagtcatgcaacgtttcttccctagtatgactaagaagcgtgaaaagacctttatcgctggactttctatgggtggatacggttctttcaaacttgccttaacgacaaataactttgcttgtgcaggttccttctctggtgcccttggattatcagcggagatgattacagatgaaacgagtgagtctaaggaatactggcaaggtgtctttggtgatttggaaggaaaagacattgagcagcataaacttgttaacctagccaaacaacatgacaagaaaaccaaattctttgcctggtgtgggcttgaggatttcctttttgaatctcaaaataaagcagttgctgatttgaaggcccttggtttagacattgactaccgaacagaccatggaagacatgagtggtattattgggaaaaacaactagaagcctacttagaatggttacctattgattacgttaaagaagaacgtttgtcttaataggtcaagtttgtaacatcttatcaaagagatgataaaagcttaaagtgatattttttgcttgtcagaactattagagcttgatatactaggggaagtttcgaaaaggaggctcaataatgaaaaaattattcagagtaatcttctatattcccaaacttcttttacaatttatttggaatcttatttgggctatatttaaacttgccctagtcctagccctcattggttatggactcgtctattatgccaataactcttcaagtaccttagccacaaacattaatcaagcctttcatcaagtagagctaggttttagtggcaccagtactagtgacgttgagaaagttgtctctaacctatcaacgacagataccattccagagtctaatggagctagatgggcgcaaaatacagctagcatctatatacaatctacagatgaaaccttggtagcagcttataaggaagctattactaactggaataacacgggtgctttcatctttactttaactgatgatgcttcaacagctgacattgttgcgactgactattccgatgcgaattcacaggcagcaggtttagcagacactcaaaccaatgttttgaccaatcgcatcactcatgtagatgtgaagttgaaccgttatttcctcttgaatagtgattttggttatactcacaagcgtattgtgaatacagctgaacacgaattgggtcatgccattggcttagaccatgatgactctaagacatccgttatgcaatcagcaggatcttattacgggattcaacaggtggatattgatacggtccatactctctatgcgaattaaggaggggagtcatgcgctatttaaaacgccttgctagacgttaccccatgcaaaccttcctttttcttttcaatgctggggtctttacttggttgcaaacaacaggaaccatgattgccaatcgtttgggcctatcaggtgatggtatttggatttatattcccaattgggtaaaaatgctgaccagtcattccatacagagtattcaaaccctatacggggcctctggttggagttggctaatcacctctatgcttctcacttggctcttgacttttcttagaggtctcatgagagcagtgattctcattctgatagttggtcttggcttatggctagtctatcgacactttgaactcttacaaaatctaaaactgtcctaatgggcagttttaaattttatgtgactttaagtccgtttcgctccaaaggtgcgaaacaaataaaccacccgctatgcgggtgcgcatcgaaggttataccgtcataacaaaaaaactccaaacgagttacaatataggtgttcaagccaattgtaaaacgaaaggagttaagactatggcgcaaaaagctcacagtttatcacatacaaaatggatgtgtaagtaccacattgtatttacacctaagtatagacgaaaaataatctataatcaatataggagtagtctgggagagatttttcatagactatgccaatataaaggcgttgaaataatagaaggtcacttaatgccagatcatgttcatatgctagtgagtattccaccacgaatgagtgtagctagttttatgggatatttaaaaggtaaaagtgcattgatgatgtttgataaacacgccaatttaaaatataaatttggtaacagacatttttgggcagaaggttattatgtaagtacggtaggacttaatgaagccacaattaagaaatatattcaggaacaagagaagcatgatatcgctttggacaaattaagcgtaaaagaatatgaaaatcccttcagggataatggtaagtaatgcgaatgcctctttgagaggcttgtgacgagtcaaaagcaataaggcttgaacaaagtgaaagccagcgtctttaggcgctggctggtattatgggcttatagcccatgatcaaaccacccgttagacgggtggttatgattgaaatgaattcttctttttagacttttcttaggtgagtacggacgctagcgacttccttcggaattccatagctaagttttgagcctagtgtctcaaaacttccgagtgcctaaagctattaaactttaggcacttttctcacagcgaaaagtcttggctacagctcgctctgaaattattaaagggactatctcatttcatctacagaaagttctatatgtttagatagccaagtcacttgtaaaaagaatctaaaactgtcctgatgggcagttttttgagttgttaggtcatttattttctgaaaaaatatgatataatatagctaatttattattttggaggacattatggctttagcaaaaatcgtttatgccagtatgaccggtaacacggaagaaatcgcagatatcgttgccaaaaaattggaagaattgggtcacactgtagatgtagacgagtgtacaacggttgatgccgctgattttgaagatgcggacatctgtatcgtagcgacttacacttatggtgatggtgagttgccagatgaaatcgttgacttttacgaagatttggctgacctcgacttgtcaggtaaaatctttggtgttgtaggttcaggagataccttctacgattatttctgtcattcagtggatgagtttgaaaatcaattcacattcacaggggcgactaagggtgctgatagcgtcaaggttgacctttctgctgaagatgaagatatcgaaaacctcgaagctttcgctgaaaaagtttcagaagcattagcataagaaaaaagcagagtaaagtctgcttttattgtagtcaaaaatggagtttttatgaatgaaatagaaagagattttaggacgcaatctcaacatctcctttggtccgtttggcgagggcttttagtgggggtgacagcaggagcagtggtcagtctttttcgttggttaattgccaaaggggccgcattttctgtagctatttacgaagacgcccttcataatccacttctgattttgggaattgtaattgttaatctcttgattgccctttttattggttaccttattaaacaggaaaaagacatcaagggctcagggattcctcacgttgaaggggaactgatggggctcttacatccgtcttggtggtcagttttatggcgtaagttcctaggtggagtccttgggatttcaatgggactgatgttgggacgtgagggacctagtattcaactaggtgccatgactgctaagggattagccaagggacttaagctctctgcacgtgagaagcgtgtcttgattgctgcaggagcggcagcagggttatcggctgccttcaatgccccgattgctggtcttctatttgtcgtcgaagaagtctatcatcatttctctcgtcatgtttgggtgacagctttaacggcatctttagtagccaatgctgtttccttacgcatctttggtcaggtaccggtccttgctatgacagaaaaaatacccgtatttcctttgaaagattattggattcttattgttttgggtatttttctaggtgtccttggatacggttatgagtgggttgtcttacgtattggtaaggtctaccaagggttagggaaaatcttccacttgccatctcattttcatggcctcttggcagttctgtttatcattcctattggtctttattttccacatcttttaggtggtgggaatgaattgattcttgccctaaatggtttacatcctgctctaactgtggctatcctctatttggctattcgctttgtttggagtatgttgtcctttggttcaggatttcctggtgggattttcttgccgattttgactctaggtgctctttctggtagcgtctttgcggcagcttttgaaaatctaggattcttacaagtcggtcagttccctatttttatcattcttggtatggctggttatttcggtgcggtatctaaggcaccgctaactgctatgattctagtaactgagatggtgggtgaccttcaccaattaatgacaattggagtcgtaaccctgattgcctatctagttatggatttcatgggaggagaacctgtctatgaagccatgcttcacaatctgattgctcacgaaccaaagcaagttgataatataccgacgatgattgacttaccggttacagatagtctagctggtcgattggttaaggatttaaccttacctgacggggttttgatttccactcagatttttcaagaccagtctgaggttgttcatggagatacacgtctaaaagcaggggcaaccctgtatctggttgttaatgaaagtaatatcagtcaagtaagaaaactatttctataagcaattcaatggcttgaggctcttttatcctcaggtcatttttgttataatggagagaaaaaaggaggtcagtatggacttaaatgagattcgccaacagattgacaccgttgataatgagattgtggctttgttggaagaacgtatgaaattggtaactcgagtaagtgcttataaacaacgcactggaaaggcgatttatgatcctgaacgagagcaggccctgctagacaaggtaggcgctagtgtccttaatcctgaatataaagaagctatcgtcgctagttttgcggatattatgaagcattcacgcacttatcaagcaagtaagctagaagaaaagtaggcatctaggatgaaagtaaaacaattaagtgatagtcaaggtctctcttacttacatttagtaatgttaagtctttatgcaatcttgttgggggtgcttgttggactgattgatgctgtttttgggcgcgtgcttataggactctcggaatttcgtgaccaccatctcttttatctagtcccggcacttcctttagcaggtcttttgatagtttacctttaccaaaagtttgcgggtaaggcggcacagggaatgggcttgattttcaaggttggacataatgaggaggatcaagtccccttaaggttaattccacttgtgactgtaaccacatggctgacccaccttttcgggggttctgcaggtcgtgagggagttgctgtacaactgggggccacagtttctcatgcttttagtcgctattttaagctcccgaatgcttcacgtattttcttgaccatgggtatggccgctggttttggaggactcttccaaacaccaatcgccgcgaccttctttgcgcttgaggtcttgaccctaggacagttaagtctgccaatcttggtaccgactcttattgcatcttttgtggctagtacgacaagccatctcttaggtcttgaaaaatttagccactttgtatctgaaagtttaactattgaccttggcacgtttatgaaattagctcttttaggtctggcctttggtctagcaggaaatctctttgcttatctcttgtcactagctaaaaagaaagtagcaagtttgctcccaaatccctattatcgtgttctcttaggaagtgtcgtcttaacctgtcttcttttgattttgtggaagggacgttatacaggtcttggaacgaatttgattgctttaagtgttggtggtgggaccatttatccattggattggctcttgaaattgctcttgaccgtctttaccctatctcttggtttccaaggaggagaagtaacccctttgtttgctatcggtgcaagtcttggtgctgttctagcaccagttctgggacttccaattccacttgtagcaggtctaggctatctgtctgtctttggtagcagtaccaatacccttttagcccctattttcattggcgttgaagtctttggtcccgctaatgcagtcccttacgcgattgtcatggcttttgcttatctcataaatcataagacgagcatttatggacaacaaaaaatgctagaaatgcaataagatactagacattctgataattttttgataagatactaagagtgtgtaatggacacacaaaaataacggctaatccgctgagacacagaggttgctcttaagattagtaagataggagtatataaaaatgaatccattgatccaaagtttgacagaaggtcaacttcgtactgacatcccatcattccgtcctggtgacacagttcgcgttcacgcgaaagttgtcgaaggaactcgcgaacgtatccagatctttgaaggtgtagttatttcacgcaaaggtcaagggatctcagaaatgtacacagttcgtaaaatttcaagcggtatcggtgtagaacgtactttcccaatccacactccacgtgttgaaaagattgaagttgtacgctacggtaaagtccgccgtgctaaactttactacttgcgtgctttgcaaggtaaagctgcacgtatcaaagaaatccgtaaataatttacagatttcacataaaaaatctgtcctcgtggcagattttttcataagtcctcttagttaaatggatataacaactccctcctaaggagtcgttgctggttcgattccggcaggggacatttttaagcctttaaccatgcggttttaagctagtttgccccgaatttaagccaaatgtaattgacgcctattgaattataggtgtttttttgataagcaaaaaccctagtcaggattagtcctaactagggtttcggatagaatactagtgatgttaagccttctgttatctcattaattggaattggcacttgtatctgtgcttgatgaagcttgtgggtactcgtaaggattgttatcaacgtcgttaatccattcattgctctgatcagttgagcttgagcgattgcttcctccgccagcacctgcggcgaaggctgcatcgtgacctccaccaccgcctccactaatggcataagagccgtcttctggtccgccccaacctcgaccaccttcagcagattttggcttttcttgagctccatcttgatgagttttttggttagattgtttctgattagattcttgaacagaaggagatgcttgatctttattttcatctttagcatccttcttattatcttctgtcgaagtggctgttgaagatttattagtagatttattgttagatgagctacttttagatgagagggtatgagaaatgtaatgtgattttgctgctgactttacaggttcttttaaatgttttgataaaaaaccaaagagaaagaagaaagctagcaaagagaaggtgataatattatatttttttcttttcaaatttggctccgttcctagtcatagatgaagagttaaaaataacagtaaaaaaccaggtttccctggttctcattattagcggcttacacgacggcgagctgcttttttacggttttcttcgatgaaagccaatttcttttcttctggttcgataatggttttcttaactgcgaagacagcacctgctacagtagcagcagttccgataacgccagtagcgacacctttagcgaatgaatgttttttagccatgagactatcctccgtatatgttataatatgcttatattatctaaaaaaatatctagaatagcaagtgaaaacattatgaaaaccaaacttattgtagtagctggtcctactgctgtgggaaaaacagcgcttggaattgaattggccaagcgttttaatggcgaaattatttcaggagatagccagcaggtttaccgacaattgaatataggaaccgccaaggccactcctgaagagcaggcagcagcagtacatcatctgattgatgttcgcaatgttgatgagtcctattcagcttatgattttgtgacagaggcagaggttgccattacagatatagttagtcgtggcaagttacctattgtagtaggaggaacaggtctctatttacaaagtctcctagaagggtatcacctaggggggcaggtagatcaggagcaggtcttagcctatcgcacagaattagagcaattatctgatcaggaactttttgaaaaaattgatcgcttaggtattgagattaaagagattaatcgtcgtcgtgccattagagcacttgaactccatcgtttttcggagaatcttgaaaatactgagacgacttatgatccctttcttatcggattagatgatgaacgttccttaatctatgaccgaattaatacacgagtagataagatggttgaacatggtctcttggaagaagctaagtggctgtacgataattatcctgatgcccagtcagctcgtggtataggctacaaggagttgtttccttattttgctggtaaccaaaccttggacgaagccttggaaaaactcaagcaaaatacgcgtcgatttgctaaacggcaattaacctggttcagaaatcgaatgactgttaagttctatcagatttctagtccagaatatcctgaaaatgtcgttcaagatcttgaattatttttaaatgaaagggaaggaaaaaaggtaggtcaatcttagttttaagaaccaatctttgctataatggtagttatgactaacgaagaaaaaaaatcagcctatgaattaatgctagcacaggctaaggtgctttttgccaatgaagacaatgctttggccaacttttctaatgcctcagctctcttgaatacaaccctgccaaattctgtgttcacaggcttctacctgatggataatgtcaagaatgagttaatccttggccctttccaaggtaatgtttcttgtgttcgaattgccctaggtaagggtgtttgtggccagtctgcagcagaaaatagaaccctaattgtcgaagatgtcaccaaacacgctaattacatcgcttgtgattccgctgctcgaagtgaaattgttgtaccaatggtaaaagatggcaaattagttggtgttctcgatttggattctcaccaagtaggagactataacgacctagaccaagattatcttgaagcatttgttaaaattctacttgagaaaaccgagcttacatttggaatgtttgaggtaaactaatgtatcaagccttatatcgtaaataccgtagtcaaacctttggtgaaatggttggtcaaaaagtgatttcaaccacgctcagacaggcggtagagtcggggaaaatcagccatgcctatctcttttctgggccacgtggtaccggtaaaaccagtgcggcgaaaatctttgccaaggctatgaactgtcctaatcaagttgatggtgagccttgtaatcactgcgatatttgtcgcgatattacaaacggaagtcttgaagatgttatcgagattgatgcggcttccaataatggtgtggatgagattcgtgagattcgtgataagtcaacctatgccccaagtcgtgcgacttacaaggtctatattatcgacgaggttcacatgctttcgacaggtgccttcaatgctcttttgaagactttggaagaaccaactgaaaatgtggtctttatcctagcgaccactgaattacataagattcctgcaaccatcctttctcgcgttcaacgttttgagtttaaatcaatcaagcagggagctattaaagagcatttggcttcaattctggaaaaagaaggattgacctttgatgatgaggctttgaccattattgctcgtcgtgcggaaggtggtatgcgtgatgctttgtcaatcttagaccaagcactgagtctttctcctgacaatcatgtcagtcaagctgtagctgaagaaatcactggttctattggtttaacagccctagacagttttgtcgctaacgttcgcaatcaagagactacgcaagctttatcaaatcttgaaactctttttgataatggtaagtctatgagccgttttgcgacggatctcttggagtatttccgtgatcttttgattgtcaaagcgggcggagagaacagtcaccatagtcccctttttgaagagaatctttctttggagcaagaccgacttttccaattgattgacttggttacaagtgccttgccagaaattaaaactggaacacatcctaaaatctatgcggaaatgctgactataaaattgtctgagacccatactcaggttttacaagaaattccagggaatttgcaagaagagttagatagtcttcgtcgcgaggtagaaggtctacgtaaagctcttaaagagggcaaagtccaaggagaagtagcaccaactcgaaaagccaaacctgcttatcagtacaaggtggatcgtgaaaagattctcactattatgcgtgaaactatggaaaatccgcagaaatcacgccagtgtctggatgccctaaaggcaacttggcctgaaatcttggattctatcagcccacaaaatagggcacttttgaatggttccgaacctgtactggccaatcaggaaaatgctattctggcatttaatgctgccttcaatgctgaacaggttatgaaacgcagtgatcttaatgatatgtttggtaatatcatgagttcagctgccggtttctcaccaaatattatggctgttccaaaagcagaatttgaaaaactccgaacagaatttgcacgcagtctcaaatccaaagaagaattggaaaaagaagatcgtgaagagtatatccctcaagaactcgagtttctctctgatgtagtagaaatagaggactaaaaaggtccagtggacctttttaggtccgagcccagaaatgaaaaagcgaggaaggtccagtggacctttttaggtccgagccaagaaatgcaaaagcgaggatgtccagtggacctttttaggtccgagccaagaaacacaaaagcgaggctgtccagtgtaatttgatagatttctgaagctgttccatccgtgtaaaaatgaaaagagcctagactgcttgtcctaggctctatctattgatataataatcctatgattcaacaaattttgtttattacgcttgaaactatttttgaaacggtttgttttaattacagtttacagcacggctattacttttttaccgccttttttgggtatttactgtttcgtcgtctttggacaacctatgttgtttcacgcattgcgcgtgcagccgataagtctaccaagaagtaaggctcacttcgccagaggtcaaccatttttcctgaccatcatcagtaagaacgagaagttggcccttatcgccaatttccttggcaataccagtataagtccttccagcttgttcaaaggtcacttgtttgtctaaaacgagggacttttctttatagactttgaccaaatcgctagtaggaatagttaaaaagagtttccaaatttctgaaatgagctggtttcgagtgatgcttggtttttcagaagtaaaaagactagtagctttattagctaactcttcaggaaaatcagtgattgagaagttaagcccaaccccgataatgacatctgtgatgcgaccagattcgatagaactaatggcttcggtaaggataccagccatttttttgttgttgaggtagatgtcattaacccatttgatttctgtattgatgccagttagacgctggatagctttgacaatagcagctgccgccatcatcgtataaggtggtaactcctcaaaatgacagttgggctttaagtggatactcatgtagataccaccttgtggactggcaaagaagtgacgttcaaatcgtcctttggctgccttttgacttgatgccagataaagtgcaggcgtcggattaatcttttccatgccatgtttagcatctagttgggtagagttagaatctggattaaagtagactggaatgttgagttgcttagagatgtcttgaggaagaagaatatctcccttttctaaatagtagcctttcttgcggacactggtaatgtcaattccttgttcttgaagtgtttgaattgccttccaaatggctgtccgtgagacaccaaggcttttagccaagctctctcccgttacaaagtcaggactcttcgataagatgtgataaacgtgttcataagttttcatatcctaagtataatacaaaagatggtaaaatgctcactataaattattgataaggcttgataataaataactatatgactagactgaaaaaacatgatataatggaaagtagttattaagtcccgataaggcaacagtcatcctagagttggctgttggttctttgtaactttttaacggcgtctagctccattaggagtatagcgttttacctattaggagacggttaaatccgtgctatctaatactatttttcatattaaaagggggacattttatatgtcagaacgtaaacttttcacgtctgaatcagtatctgaggggcatccagataaaattgcagaccaaatttcagatgccattcttgatgcgattttagcagaggatccagatgcacacgttgcagcagaaacagctgtctacactggttctgtccatgttttcggtgaagtttctacaacagcttatgtggatattaaccgtgtggttcgtgatactatcgctgaaattggttataacaatgcagaatacggctttgcggcagaatctgttggggttcacccatcattgattgaacaatctccagatattgctcaaggtgtcaatgaagcacttgaagttcgtggaactggtgatcaagatccacttgatcttatcggagctggtgaccaaggtttgatgtttggttttgctattgacgaaactccagagtttatgccacttccggttagcctttcacataaattggttaaaaaattggcagatttgcgtaaatctggtgagatttcataccttcgtccagatgctaaatctcaggttaccgttgagtatgatgagaatgaccaaccagcacgtgttgatacagtcgttatctcaacgcaacacgatcctgaagcgactaacgaccaaattcgtcaagatgtcattgaaaaagtcattaaggcagttattccagccgaatacttggatgaggagactaaattctttatcaacccaacaggtcgttttgttatcggaggacctcaaggggactctggtttgactggtcgtaaaatcattgttgatacttatggtggttactcaagacatggtggtggtgccttctcaggtaaggatgccactaaggttgaccgttcagcttcatatgcagctcgctacattgccaaaaacatcgtagctgctggtcttgctaagaaagcagaagtacaattggcttatgctatcggtgttgctaaccctgtgtctgtccgtgttgatactttcggaacggcgacagttgctgaaagtaaacttgaagctgctgtccgcgatctctttgacttgcgtccggcaggtatcattcaaatgctggatcttaaacgtcctatctatcgtcaaacagcggcctatggtcacatgggacgtacggacatcgatcttccatgggaaaaattggacaaggtagatgccctcaaagcagctgtagaagcttaaaaagatttaatattactttcaatttaataatatcaaagtaacagaatttaatttttttgaattctgtttttttgttttgaaaataaataatatgaattttctgacttcaaacacttgtaaagcctatgaattgagtgatttaaggataaaaactaatagctatagataaattcttttggtgaaaacctttgaaaggagttgaaaaataagaataaattgctataataagagtgacgatgtaaatataaaactagagtcattttagattgatagagtaagaagaaatacctttaaataaggtttaacaggtgttagataatctaaagtgatctggttagtttgtgatttcttggggaagctaatcaacataacaagatatttagtcagttaatttaatctattctttaataatattaatttacgttaatgtttatttagaatgatcttgttctttcttatatttttaaaatctttaagaatcttcgaaagagattcagatgagagttacgtgctcactcattggggaggaggccataactttcaaagagctttcttaagaaaggcattacatggtggtcttgagattattgggaaatacttgagactaatgattagaatgggtagagagtgtagttaaggggacactcttaaaagtggggagaagtttatgaatattttgatacttggtaatactgctggattaacaaacgatttcattttgaaaacgtttcctaatcaagcagtttttatttttggtcatacaggtgtaaagaactctcgtaagaataaaatcaccgtatataccaaacattatgagaacaatcaattagaagatgtttttgattttcatgattatgatcaaatcatctatttttcggaatatctcaattatggacatgaaagttcaggggagattgaaaatctcatcagattgttagagtgtcttaaagatagaaaaaacaaacgtttactttacattacaggtcctgtccttgaggatgggaaacgaagcttacagacgacaactaaggataccttattatcttggactcgagaatttggggtcaaccttaaagttctacatagtccctttctttattcagtcattaataaagaagattatctatataaactgtttgtacgtttagatgatcatgagcaggtggagttgaaggagtcatcacaaagtcaggcgacttttatcagtctatctgacttgggagatttgcttcacaaattatgtgagcgctggaatgacacctatgaaagtattattattccagatcctttccaactgacttttggtgagctcttgcaagctttggataaatatttccctaacaagcaggttcatttcttagaggaaagaagaattaggaaatatgataacgatcctgaaaagcaccatgatttgcgtgatcgattcgcttggtttatgcgttatgccttggtgcgtgacttgccagatatttacgaagactatcaaaagcagcgaaaaggttctttacgtgtttctaagttccgcaatatcgtagataatatcgttaagcaaaagagaaataagaaacttgctgctgttgtcgcgactttcttagtctttgaagcttttcgatatatgactcaaggtcagttacagttccaattgaccgacctacgtttgctctttgttgtcttgattagtacagttttgggcatggggtatggcttgttctcagcagtacttgcaattattggtttgacaatcagtcaaattttgtctgggactagctggcaattgcttctatataatacggatcgttgggtggcctttattgcctatatctttattgctgtggtttgtggatttgtagaaatgaagaaaaaagatgacaagctacaactagacaaacaattggaaacagttaaggaagactatcttatccttaatcaatcctaccatacattacttaatgaaaataaagacctgaaaaatgccttgttggcaagtcaagatggtcttggaaaagcctattcttactttgtgactttagatcatgctagtgttgagatggttcttagacagacgattgatttggtttcagagattttgaatgctccagtttcactttatggtggtggtcctttccaatatgagctccttttgggagataacgataagaagcaagtatctttgacagattttaaagaagttggagatgccttcggacatggacgtgtctgggctaataaatcattgcttgaaaatcgtccagcttatgccatggaagttaagaccaaggcagagggtacctttatcatttgggtagaggctgttccttttgaagctatgtctactaaagtgttaaacgagcttgaggttctttcaaaaatgagtcgttctttcattgaaaaggcagaacttcttgaacaagctagtcatcaagggagggttgcacaatgattccagtcctaattactagtattttaacggtttgttacttcctatctatagcacttgtctataaagccattgttagtggcagatcagatttaaccattttttacttgattttcccaattgctttacctttctttggtgccggtctgattcatatgatttctaagccaaatcctggtagacaccgtcgtggtcaagaagcagcagttggtggcaaaattaaagatttgaccattgattttggaaatatcgatgattttcaacgtcctaaggaattggttgaagaagacatcgttcctcttgaagaatctctctatttgaataaggctaaggaagctcgtcagcaattgatgggattggctaataatgatccatctcattttatggatttgctctacttggctcgcttaaatgaggacagtgaaattgttcactatgcgacaacctttatttctgaaatttcaagtcaatacgatgagaagttgagtgcctttgagaaacgttttgaaaagggtgaagcagactttgacctcttaaccgagtattgtgattttatggaagattacctctctaaagaacttctaagtaaacaaatggaaggtttgcttcgtaaggagtacgaggaacgtctcttgcaaaagcttagtcacggaacgactgctaaagacttagtgagagttatccataatgaactagctcttggtttgtatgatttggctcaaaagcatttaacacagctttcaattaaatcaaatgcggatgatgtgtattatttgtatttggaatattactatcaaactggtcagtttgatgaatttaagaacatgattcgtgagatgcaaggcaaacaggttgttctttctaaggacaagcaagatctcttgaacttctggcaaggaaaagaggtgatggtatgaaattaggtaaaaagaatgttatccgcaaagaaaccttgctaggtgtcggacttattttgtgtttggccatcggactctttgttcaaaagaagggggaatggtacccaactcaaggtaaggaagcctatcttaccggaaaagtaccttctacggcctcagtggtcaaggatttagataaagatacactggttctttatgatagtgaaaacgagacgagtcaaagggcttggaaacagtttgagcaaattctaaaagatatgcgtatgggagctaagttagtcgatgtggctaaacacgagtcttattcactttcagactataaaaaagtagtccttcttgtcactgacctttctcgaatggaggatcaggttcagccactaatggattggactgaaaaaggtggtcaaacactttttgcagtaaccatggggaaagaaagtaatctggatgccattgatcataatctcggcgtaagttattccaattttgagatggatgaggtcaaggaaatctacgtggattctgacttcatgattggtgggggacgcaattataaaattgaagaaccttttgagtcagctagaaaagtctctcttgaaagtgatgttaaggtgcatgctaaaacaacagatgattctcatacaccgttgatttgggaaaaatcatacggcaaagggaagtttgtcgttgataaccttggaatctatgagcgtaatgtccgtggtatttatgccgcttcttatagccttttgactgaagcgacagtttatccggtaatcaatggctctacctattatatagatgatttcccatcacctgttccagctggagatggtcgtttcgttaaacgtgattacgacatgtctgtgtctgaattttataccaatgtttggtggccagaccttcttaaattgcacgaaaagtatggtatcgttcatacaggtgtggtcattgaaaactatgaggcccagacagatggtaaaattgttcaacaaaatgatttagatcgtttcaaatattttggaaattcgcttttggctaatggtggtgagcttggttatcatggttataatcaccaacctttgagtccttcatctgttaattatggtgaaaagtatgccagctacaagacttggaaggataaggctgctatgaaggctggtctgtctgagttgattcgttttgtcaaccaactctttcctaaagcgcaaaaatcagtctacgttccaccatcaaatattctttcgaaagaaggacgagaggtaatcgttaatgatttcccagaaatcaaggctatctcaagtaactatttcccaggggatttcacttattcgcaagagtttgaagtgtcgcctgatggaatgattgaagagccacgtactgtttctggtgcggtttgggatgatttctcacagatgacggtcttttctgaaatgaatatgcactatgtcaataaccatttccttcaccctgatgatgttcttgatgtcgatcgtggtgcagaattgggttgggcaaaaatgtataaggctttggacaaggaagttagttgggtccacaatatgtcaccttcgctgagaaatctaacaggttcagaattagcaggtgctgttcagcgttacggtattttgaaagtatctcaaaaatataccaaagacgccctgaaaattgatcttgagaattttcatgatcatgcttaccttatggttcgtttaaatcaaaacgaggttaagaaggtaaaaaatggtaaggttacgcatttaacgggtgatctttacctattggaggctacgaataagtcagtcaccatcacattaaaataaggcaaaataggggaaaatgccgatgaagatatgtttaattcttgaagggtcctatccgtatgttcacggtggtgtctctacttggatgtatcaatatattacagaaatgaaagagcatgaatttgttctttgggttgtgggggcaacgcatgagcaaaagggaaagtttgtttatgaacttcctgaaaatgtcgtagaggtacacgaagtctttttggactatgttgtgccagataaagaagaagacatagagccacatcagtttacagatgaggaaaagcaagcgcttaaagatatggttttttgtcaacaacctgattggaaagtcttgtttaaacttttacaggatggtaaggtcgttcctaacaatctcttgagtagtgaggccttttttcaggtcttgaaagatctctgtagtgagcgctacacgcagctatctttttcagatgtttttcacactatccgttctatgctttttccacttttaaatattttatcctgtccacctcctaaagcagatgtttaccactcaatctctacaggttatggtggtattcttgcaactttgggcagtttgacctatgacaagcctctattcttaactgaacacgggatttatacgcgtgaacgtgaggaggaattgcttcgcgctaagtgggttttacctacaatgcgccaacagtgggtaagattcttctatatgttgtctgatgcgatttatcaaaatgctgaaaaaattactagcctctttactaaggccaaggaaattcagattgagatggggtgtgatccagagaaatgtcaggttatttcaaacgggattgactacgatgcgttttctcaaattcctttgaaagaaccagatggttggattgatatcggagccgtggttcgtttggctccaattaaggacatcaaaaccatgttgtattctttctacgaactagctcagcaagtgccaaatgttcgtttgcatatcatgggtggcatagatgaccaagaatatgcggatgagtgttttagcttggccgataagatggatttgggagatcgtctcctattcactggtcgtgttaatattcgagaatatatgaagaaaattgattttacgcttttgaccagcctttctgaaggtttgccactttctgttttggaatcaatggcggctagccgtccttgtgtgacgacagatgtcggatgttgtcgagaattacttgaaggtcgtgagggtgacaatttagggattgcaggattttgtgcgccacctacttgtacagggcctcttgcagaagctatgaagaagatggcgattaatgatgctagacgtcttgaaatgggtgaaattgcgcgtaagcgtgttgaagcgatatatcaatatccgcaaatgatcggtcagtaccgacgcttatatgaggaggtggctgtttaatggccggtattggatttgaattacgtaaaatttacaacgaggatagccttttttcaaaacaaaaggcctacgcttatgctggaattgtttataccggtcctatgcttttggggattttgcttacagctggtgtcgttgttctaacaatggtagcgggaatcagtgaaaatgagcgtgattatattctttcaaacttaacttacgctattatcttttcactcgtgattaccagtctcttttctctggtggtaactcgctttgttgcggacatgctctacgagaagaaatttgagactatcatcccttcattttatgcgtcgagtgctttgatgcttttaattgggacaccgctttatgcgatctatctagccttggctagtcgaagcttagcagaagtggctatgggagttttgctctttggtgagctctgtctcgtttggaatgtcattacctacttgacagcgatcaaatcctataaagaaattatcaaaggtttctttttagcgattggtgtgacgattgtctctgggttacttagtattttcctacatcaaaagtatggtatcttcctaagtgtttgtttgggatacggtggaatgatgttttggatggttcgtctcatccatgactatttcccatctaatcttaaaatgtcctttgagtttttgaaatggtttgatcaattctctgatcttgccaagacagggctttacatgttggtagcactctttgctcatattattattaactggtttgggccaattagtaagagttttgatggcttcttccgtacagctccagtctacgatgtgccagccatgctagcctacttaacgactttggtatcaacacttaatttcgttatgtctgtcgaggtttccttctatccacatttccgacgttattttaacctctacaatgaagaggggagtctttcggatatccaggaagctgaaactcaaatgttggatgtcatgagtaacgaactcaaatatgttttttggaaacaattgctagcaacaattttcattatgttcttcggaagcgtggccttgacttatttaccaattggttttaacaatcaaatgcatgggtactttttaacgctatgtcttgcttatggcctctatgctgttggtaatgtaaatatcttgctattgatgtattttgcagattataagggggccaagaaacttgccaaacactttgctattttgacagtagttttgagttttggttctcagttcttggactcagccttcctaggctatgccttcttgatttcttctttacttcttttccttgaaagtggtcaggaaatcgataaatacacaagtgatcttcagtatcatttcttaggaagccaagccatggtatctaagaaagacgtgggctattttgaaaaatggactgagcgtttagaaaacgtacaaaagaggtgggggaaatgaataggaaaaagagtttagcagcagttttgttgctctgtacggtctttggttttacagcatgcgggaccaaggagcaaacaaaaaatggtgtgacaactaaaaaagtagataaacaagcaactactgatatcacgaatgtgcacttaagagataagaagagcctctatgataaggatcatacaaaggtaacgaccatgtacctgacagtacgtcgaggagatgctacagaaaatcaaaatcactcatggtctgaggtcaatcaatattccgttgaagattatcagaaaatgcatgttaaacgatatcaagtagcagggctccttcaagttggtaacgaggacggtcctgtctctggtgagttaggttatgaccaagacgtgccaaatgccagtgttcagattcgtggggaaagttcaagtaagaacgcccaaaagaactacaaaatcaagattaaaaagaacaagggtgagtggaacggccaacgtacgattaacattaacaaacaccagacagaagcccttcgctttagaaataagttgtcttatgatttaatggaagaaattcctcaactcatgggtgctagaacgagttttgttcacctctatgttaaagatgaaacctctgacaatccttcaggtaagtttgaagattatggtctctacacgcaagtcgaacagattaacaaaaactatctgaaagatcacggtctggatgaaaatgccaacctttataaaccaaacttcttcgaattcttccgctatgaggatacgattgttaaagaagatgatcctaaatttgataaggataaattcgagaaacttttggaaattaaaggtagccatgatcacaccaaacttattgattttctaaccaagctcaacgatccatcggtgaagattgaaaccatcatggacaagtatgtagatcctgagaacatccaatattggatggcattccagatgttgcttggtaatgatgatacacagagtcgtaacatgtatctctatagtccacaaaactcaaccaaatggtacatcattccttgggataacgatagtatcctgatgaagaatgaacgtcgtttggtaagtaaggacagcgaccaagccaatagctgggaagtcggtgtcagcaactattggggtaaccaacttttccaacgtttgctcaaatcaaaagagttccgcaagggtctagatgagaagatggatgagctacgtaagacaattactggtgacaagatttcttcaatgagtaatgaatacgcagcagtcattaaaccttatctagctaagatgcctgaccaaatgcatgctaagacaacacctgataattacgacaagatcttggcagatttgccaaatgagttggagaacaactacaagatttacaaaacaagtcttgaaaaaccacaaccattctttattaataagccggaagtggccaataacaaattgaaattaagttggggtgcctcttacgacttcaataacagcaagttgacttacacagttgagttagctaaggactatgaatttaaagacaaggtctttgaaaaatctggtctcaagaccctcagtgccgaaacagataccttgcctaagggacaatactttgtacgtgtgactgcaactaacgaagctggacaatcacaacgtgcctttgactactatgtcaatagtgataattcaaaacaatttggtatcatgagcttctttgtccttgaagatggaaaaattggggtagatggctatgaagactaaagagaagccctttcgccatgagttgaaatatgtcatcggtgaaccagaaaaggctctgctgactgagcgttttaaacatttgattcaattggataagcatgcgacaaatggtggttataccattaggagtctttactttgacgactattggaatagtgcctatgctgaaaaagatgcaggtattctagttcgtaaaaaatatcggattcgtatctataatttcggtaccaatagtattaaactagagcgtaagaaaaaggtagatacctacattttgaaagaggatgcacctctaaccgttgaagaattttataaaattattgatggagactatgactttctcttaaaaagtccatatcctctctgtcaggaattttactatgaatgcgttagtaacatgatgcgtccacggaccatcgttgactatgagcgagagccgtgggtctatgactttggaacagttcgcttaacctttgaccaaaatgttagagtagcggttggaagttttgatatttttgatccagacttaccaacaattccagtcattgatccagaaaagatggttttcgaagttaaatacacagagtatctgccaaagattgtccagagtgtcttgccagggaaagcagacatgatggctgtctctaagtacgtattggcttatgaaaaatctcagtatctaaatggttttgaatactgggaagatgggaatatataaataggaaaaggctaagtttggaagaacttagtataagaaggggagtttatgagtgttcaagactttataaaaaaatcaattttgcagtctgataactatgcgacacaatcaccgtttcgtattgttatcgtcttgctacttgccttgttgattggagcctttatctataaggtttaccagcatttctttacaggcgttatttattcacgcagttttgccatgaccttggtcggtatgaccttgcttacgtcaatggtaacactggcaatcagttcaaacatcgttatctcacttggtatggtcggtgccctctctatcgtccgttaccgtaccgctgttaaggatcctatggacttgctctacttgttctgggcaattacctcagggattacggtaggggcaggtatgtatgtcctagccgttgtaacgtctatcgttatccttttaatgcttattgtctttagccgcttgcaagagactggtaaggtgtatatcgctgtggttcactatgatggtgagcacacaggtgacaaagttattcaagaacttggtcgcatcaaacactttatcaagtctgaaactatgagaaaagacagtgttgagatggctattgaagtctttgtgaaaaataacgaccttaccttcgttgaaaacattaaatctatcgaaggtgtcaaagaccttacgctgatccaatacaacggcgaataccatggctagtaagcgtgagaagaagagttggagtagtcgaaagaagaaactttggctcgtcatctgtctaatcatcattacgagtggtttttatgctatttttgtgtatttgaataccagaaatacaggtaccaagtttgaatatacgctttcagacaagagttttgggaatccgctcatgggttatgtcccttcagcggaagaaaaaacagtttctgaagatgttcatcttgtctatgttgatatcacatggaaagaattggaacctaaaaagggccattataactgggaaacgattgaagaaagtaaccagttcaaacgatggaagaaagaaggcaagcaggtcgtcttacgtttcttgctagattaccctggcaaatcaagtcataaggatattcccgactggttgggaaatgaaatttctgaccttggggatgcttataacacatcctatggtaagggattttcaccaaattaccaaaataaactgcttagaaaatactataaagaagctgttactgctatgggacagcgttggggcaatgatgattttatcgcctacatcgaacttggtggcttaggacactggggcgagtggcatgttcactcagatgctggcattcgccaattgccacgaaaagaagttcgtaaggactacatcgcaccgtttcaaccagcctttcctaaagcaaagattcttatgagaagaccttttgatacaggtttggaaggtgattttggaatctacaatgatgtctttggagacaaatcagcaactaaaacctggttaaattggattcaaaatggtggctcatacgatcaaacccaagagcaagcagccttgaaagccatgcctaaggcttgggaaaaggctcctatcggtggtgaattaacaagttcacagtctatgtctagcttactaggtaataacttagatgagttaactgaagaagctaaggcagctcatttgaccttcttgggtccaaaggttgctgaagatatcggtgacgggcaagctgcttataaggagctcttgaagaacatgggctatcgcctctgggtgtcaggtttggcaatctccaaaggagagagcaaggttgatattacccttaatttggaaaattctggggttgcccctttatatggggattggcctgtggtattatacttgtgtaatgctaatggtaaggttcttcaagcacaacaacttgattgtcgtttgtctgaattgcttccagatcaaacaactgaacttaaggcaagtttcgcctattctaaagatcagaactatcaagtgaagctaggaattctatctccaatgacacaagagccttcggttcattttgccatgaaaggttttgaaggagaagtcatgcctaaattagcaacgattcaaaaggatcaaaaaggcactggcaagtaagaaaggaaagataaatgtctattttaattacaggaggagctggctatatcggtagccacacaaccgttgaactccttaatgcaggtttcgatgtagtcttagttgacgacttttcaaatagttcaccagcagtacttgaacgtttggaaaagattacaggtaaaaaatttccattttatcaaggatcaattttagatactgattttttggataaggttttcacaaatgaagatattgaactagttattcactttgcggccttcaaggcagtgggtgaatctgttcaaaaacctttgaaatattataagaacaacatcagtggtaccattaccctccttgaaaaaatgaaggaatacgatgtgaaaaacattgtcttcagttcaagtgccacagtatacggtaccaataatccttctccaatgaccgaagatatgccaacatcagctatcaacccatatggttatactaagttgatgatggaacaaattcttacagacgtagctgcttcagatccgtcatggtctgtcacaaatcttcgttatttcaatcctatcggtgctcatgaaagtggtttgattggggaattgccaaacggtattccaaacaacctgatgccatatattacacaagtagctatcggtaaactgcctgagcttaacgtctttggggatgattatccaactccagatggtacaggtgtgcgtgactacattcacgttcttgacttggcctcaggtcacttggctgctgtcaaatataatttgagtcataaaggtgctgagattttcaacttgggtaccggacatggttatagcgttttggatctcgttaagactttcgaagctgaaaacaaggttgctatcccataccgtattcaaggacgtcgtgctggcgatattgctacttgctatgcctctcctgaaaaggccaaagaagtccttggctgggaagctaagaagaccttgaaagaaatggttagagattcatggcgttggcaaacgactaacccaaacggttatgaagactaagtagcataactcaaattatcagttcctagggagtgtaagataagcactagattattttaaactatgcctaatctagtagcttcaaaaataaagagaagaggagtggaagcggtcactaaatgattacagatttagaactgtctcaccctctttttatgttttagcttagctttctatggtataataaaattatgactattattaatcaattcgtcactttggcgagtcaccttgtatttataggattgagctaccaaatgctgattagcctttttgattgggcgaagatcatcaaaaatccgattgaaaatactggtaaattgaaactctttttgctctttatcagtattgccttaggctaccttatcagctcctttgttctggcggttttagcttttggacagaatatggctagctcgatttcttaaattagtgattttaaaagacttttgatataatacaaaaagatgaaaatgacccttgaaaggaatccttatggataaaattattgtgcagggtggcaacactcgattaagtggtgaggttgtcattgaaggtgctaaaaacgctgtccttcctttgttggcggcgactatcttggcctcagaaggtcaaacaaccttaactaatgttccaatcttgtcagatgtatacacgatgaataatgttgttcgtggtttagatattgctgtagactttgacgaggaaaacaatatcgttgtcgttgatgctagtggagaaattctcgatcaagcaccatatgagtatgttagcaagatgcgtgcgtcaatcgtagttcttggacctattcttgctcgtaatggtcacgctaaggtctcaatgcctggcggttgtacgattggtagtcgtccaatcgacctccacctcaaaggtttagaagcaatgggtgctaaaattacccaagttggtggtgacattactgcgacagcagaaaaccttaaaggtgcaaccatttatatggacttcccatctgttggtgccactcaaaaccttatgatggcagcaactttggctgatggtgttacaaccattgaaaatgctgcgcgtgaaccagaaattgttgacttggccctccttcttaacgagatgggagcagacgtcaaaggtgctggaactgaaacgctcgtgattaaaggtgttaaagctctccatggtactaaacatgcggttgttcaggaccgtattgaagccggtacttttatggtagcggcagctatgacttctggagatgttctcatcaaagatgctatctgggaacataaccgtcctttgatttcaaaattattggaaatgggtgtcgatgttaaggaagaagacggtggcattcgtgttaaatctgatgtttctcaattgaaaccagtaaccgttaaaactctacctcacccaggtttcccaactgacatgcaggctcaatttacagcacttatggcagtggtaaacggtgaatcaaccatgattgaaactgtctttgagaatcgcttccaacacttggaagaaatgcgtcgtatgggacttcattcagaaatccttcgtgacacggctatgattcacggtggtttgccacttcaaggtgctcaggttatgtctactgaccttcgagcttcagcagcacttattcttacaggaatggtagctgaaggaacaacgactgttggtaaattgacacacttggatcgtggttactatcaattccatgagaaactagctaaactaggagcaaatatttcacgtgtaagtgaggcttagtatggaaactggtaaaggctatgtttttcgtcaattattacttgttttgagtgtgtgtgtgattggccttgcttttctagctatcggtttgatgattggctatgctgttttaggagagggcaaggatccgataagcatcttaaaaccagaaacttggcaggcaattgttgctaaatttacaggaatataaaagggagcgggaagtaatcccgctcctttagtcatgacatacatataaaagaaagagaacaatggcaaaaagaaagacatctttaacaaataaacagaaacgtcagctagtctcgttactaatagcggttttgattgcagttttaggttacattggaacgagcaataagctctcacctaacaatccaatcaagcaggtagctagtctagtctcgggaaaatccaataactccgccaaatcaaacggctcaacaagtgggcagtctatgccacaagagcaactcgcagagacggtgatgaccagctctgtcaagagtcaactcggaaacgccatagaatggaatggggctggtgcctatattgttaacggtaataaaaccaatcttaatgctaaggtatctagccaaccctacgctaataaccaagttaaaacggttcaaggacaaacggttcctacagttgcgaatgccttgttaagtaaagcgaccagacagtacaaaaatcgtcaagaaacagggaatggctcaacttcttggacaccagctggatggcatcaagttcacaatctttcaggagagtatagccatgccgtagaccgaggccatttgttaggttatgcacttgtaggtggtctcaaaggatttgatgcctcgacttcaaatccagaaaatattgccgttcaaactgcttgggctaaccaagctaatagcgaaacttccacaggccaaaactattatgaaagcctggtacgaaaagctcaggataaaaacaaacgtgtccgttatcgcgtgaccctcatttatgaaggagataacctcattccatcaggaacccatcttgaagccaagtcagctgatggctcgcttgagttcaatgtctttgttccaaatgtccaacagggaattaccctagattattattcaggcaaagtaacggtgaattaacgaaacaaacgactccggttggagtcgtttttagtatctagaaaaacaaaaacccacccgtaggtgagttttttgttttattcactagcttgctcccattgtttagagaggtagcgagagtagctagaaatagcaaagttaaccacgaaataagctaaagccacaattccgtataaggtaaagatttggctaggttcgtagtaaccacccatcaaaatctgactcttaccaaacaattcttgtaaggcgataacagagtaaaggaaagaagtatccttgataactgttacgaattgagaaatgatagatggtaacatcttacgaatagcttgtgggaagatgatgtaaataaagatttgtttgttgttaaatccttgagacaagccggcttccgtttggccatggtcgatagagttcagtcccccacgaatgatttccgccaaggcagcagaggtaaagaccgtgaaagaggtaatccctgccgcagttgacttgagttggaagaccaagaagataatgaaaatccaaagcaagttaggaacgttacggacgaattcaacgtagacagaagccatccaacgaagaataggattctttccgttacgcatcaccgccagaattgttccgaacagggtagatagcacgatgatgaagaaagacaagtaaagagtcgtccacatcccttgtgccaagaatttaaggttagtagctgataaaacttctgacatagtggacctccttagtaagctttcttattctcttcttctttacgacgtgcccaggtagctagagggaaacacatgataaagtagaggaaggcagccccagcaaaggccggcacatagttagtggtatcataagcccaagccttagccgtgaacatgatatccgccccagaaatgatagcaactgttgaagtgtttttaatcaagttaaccacttggttagtcaatggtggcaagatagtacgaactgcttgaggcaagatgatgatacgcatggtatcagcgtaggtgaatccttgagacaaagcggcttcggtttgacctttaggaactgcctcgatacctgtacgaataatttcagagatataggctcctgtgtagacacccacacaaaggatagctgtcaatgaaattgggatcatgacatgaccatcagtcaagattgaaatcccatagaagacaaccacaaattgcacgagcaagggtgtgttctggaagatttcgacataaacacgtgaaatgccacgaaggaccttgttgtgagtcgaactcatagctccaaagataagcccaagaagaagggcaacaatcaaggcaccaattgaaataccaagggtgtaaaagaaacctttggcaaattgcccaaagttagcgaagaaagcagcccaacgttcaagagcgaaaggactagccgtttcagttaaaagatacataaattcaggactcctttctatttatcttcagccttagctggtttcaagtgatacttatcgtagagtttttgaaggctaccatctttttgccatttagcaatcagatcgttggtataatcaatcaactcttgattagacttgcttgaggcaataccgtactcttgtgttttgaaaccttcttttaaggttttagttttcttactttcatatccagagaggatagatttatcaactgagaaagcatctacacggtgagcgtaaagagaaacagccaattctgggaaagatccgagttgaacatagttgaacttaaggttattagctgaagcgtactcttgcaacgcagccttagttgacgccccttgagaaacaccaatagtcttaccattcaaatctgagattttgttaatccctgaatccttaagaaccaagaaaccgatttggtcatagtagtaaggagttgagatagcgtaagaagccttacgttcatcattaatggtataggtagcgataagcaagtcgatagtaccgttatccataagtggttcacgagtttgcgtcgttactgggatataattcactttaacttttaactcatcagcaatcttcttagcaagatcaacttccataccttcgtaggtattagtcttagcagaatagtaaccaaagttaggaacgtcttgcttcacaccgacattgagtgtccctcgcttaacaatcttttggactgctttactatcaagaagcttactagtgtcttccgccttagtcttgtgactcgtgataagaaaaatagtgagtattgccaagcttgcaacagttaggtaacgtaagatttttttgaaaatcataggcaacctccttaggcatccacttggacattatcagagttgtgatcgataatcttagaaaggaattgaaccgcacgaggttcagttggattgtcaaagaaaccatccacatccgtagtgtctacaagaacttgaccttcagccatgaaaatgatacggtcagccacactgcgggcaaagcccatttcgtgggtaacaaccaccatgttcatgccacctttggcaagcttttgcataaccgcaagcacgtcaccgatagtctctgggtcaagggctgatgttggttcgtcaaagagcaagagttcaggattcatggcaagaccacgggcaattgcgatacgttgtttttgcccaccagaaagcataccagggtatgaatctttcttgtcccacatgttaacgtagcgaaggaatttttcagcagtcttttcggcgtctgccttactgattccaagaaccttgattggtgccaaagttacattttcaagaacggttttgtgcgggtagaggttaaagtgttggaataccatccctgcttccttacgcaattctaccaactctttggcagaagcttccgtcacattatgtccgttaacgataagcgtaccgttatcgatggattccaaggcgttgattgtacggatgagggtggatttcccagacccagaaggtcccaagagaaccacaacttgtcctttttcaatttctagattgatatcacgaagtgcatgataatctccgtaatatttattaacatttttaaattcaataagtgccataagagcctcctataatggatttacttgttagcttttctaacatatattgaattttagcataagtaaagtcgaaagtcaaaaaattccgaatattctttcaaaacgttcggtttttactaaataattaatcattttttgatataaatatgagaaaacaaaaacccacccgcaggtgagtttttgttttattcactagcttgctcccattgtttagagaggtagcgagagtagctagaaatagcaaagttaaccacgaaataagctaaagccacaataccgtataaggtaaagatttgactaggctcgtagtaaccacccatcaaaatttgactcttaccaaacaattcttgtaaggcgataacagagtaaaggaaagaagtatccttgataactgttacgaattgagaaatgatagatggcaacatcttacgaatagcttgtgggaagatgatgtaaataaagatttgtttgttgttaaatccttgagacaagccggcttccgtttggccatggtcaatagagttcagtcccccacgaatgatttccgccaaggcagctgaagtaaagaccgtgaaagaggtaatccctgccgcagttgacttgagttggaagaccaagaagataatgaaaatccaaagcaagttaggaacgttacggacgaactcaacgtagatagaagcaatccaacgaaggataggattctttccgttacgcattaccgccagaatagttccgaacagggtagatagcacgatgatgaagaaagacaagtaaagagtcgtccacatcccttgtgccaagaatttaaggttagtagctgataaaacttctgacatagtggacctccttagtaagctttcttattctcttcttctttacgacgtgcccaagtagctagagggaaacacatgataaagtagaggaaggcagccccagcaaaggccggcacatagttagtggtatcataagcccaagccttagccgtgaacatgatatcggccccagagatgatggcaactgttgaagtattcttaatcaagttaaccacttggttggtcaatggtggcaagatagtacgcacggcttgaggtaagatgatgatacgcatggtatcagcgtaggtgaaaccttgagacaaagccgcttcggtttgtcctttaggaaccgcctcgatacctgtacgaataatttcagagatataggctcctgtgtagacccccacacaaaggatagccgtcaatgaaattggaatcatgacatgaccatcagtcaagattgaaatcccatagaagacaaccacgaattgcacgagcaagggtgtgttctggaagatttcgacataaacacgtgaaatgccacgaaggaccttgttatgagtcgaactcatagccccaaagatgagcccaagaagaagagctacaatcaaggcaccaattgaaataccgagggtatagaagaaacctttggcaaactgcccaaagttagcgaagaaagcagcccaacgttcaagagcgaaaggactagccgtttcagttaaaagatacataaattcaggactcctttctatttatcttcagccttagctggtttcaagtgatacttatcgtagagtttttgaaggctaccatctttttgccatttagcaatcaaatcgttggtataatcaatcaactcttggttagacttgcttgaggcaataccgtactcttgtgttttgaaaccttcatcaaggatcttggttttatcactttcgtaacctgacaagattgatttatcaccagcaaaggcgtcaatacggtaagcatagagtgatacggctaactcaggataagatccaagttgaacgtagtcaaacttaaggttattagctgaagcgtactcttcaacagcagctttggcagatgacccttgagacactccaatagttttaccgtttaggtcagaaagtttcttatagccagatttggtttgaacgaggaaaccgatttggtcgtagtagtaaggatttgacatggcatatgaagccttacgctcatctgtaatggtataagtagcgataagcatgtcaatagttccgttatccataagggcttcacgagtttgtggggtaaccgctgtaaaattcaccttaaccttaagttctttggcgattttcttagcgaggtcaatttccatcccttgataggtattagttttggctgaatagtaaccaaagtttgggacatcctgtttgacaccaacgtttagagtcccttttttgacaattttttgaattgcagcactattgagtagtttactgctttcatctgcctgactacttttagtgttccagaggagaactgctagaaaagctataacagagatagctaaaatgcgactaagtttcttgattaacataagtcctccttaggcgtccacttggacacgatcagagttgtggtcgataatcttagaaaggaattgaactgcacgaggttcagttggattgtcaaagaaaccatccacatccgtagtgtctacaagaacttgaccttcagccatgaaaatgatacggtcagccacactgcgggcaaagcccatttcgtgggttacgacaaccatgttcatgccacctttggcaaggttttgcataaccgcaagcacgtcaccgatagtttctgggtcaagggctgacgttggttcatcaaagagcaagagctcaggattcatggcaagaccacgggcaattgcgatacgttgtttttgcccaccagaaagcatgccagggtatgaatctttcttgtcccacatgttaacgtagcgaaggaatttttcagcagtcttttcggcgtctgccttactgattccaagaaccttgattggtgccaaagttacattttcaagaacggttttgtgtgggtagaggttgaagtgctggaagaccatccctgcttccttacgaagttccaccaagtctttggcagaagcttctgtcacattatgtccgttaacgattagggtaccgttatcaattgattccaaggcattgattgtacggataagggtagatttcccagacccagaaggtcccaagagaaccacaacttgtcctttttcaatttctagattgatatcacgaagtgcatgataatctccgtagtatttattgacatttttaaattcgataagtgccataagagcctcctaaaattttacatttatatatgtaacaacaagtgtgtattttactatatatatcggtaaatgtcaaaaatgtttgaaaattcaatcataatgttcgccttttaaccgattacaggttacaaaactatctcaaaaaacaaagaaagcttgtctatcagcgtgatatctcgtgatatctatagtagaaacttggtccttgacctaatttttggtataatgtgtttgatatgtaaagtttttttctactttgcagaaatgaaatgacttaagaaaaccgatgaggtgtttatatgaaaaaaattctagttgttgatgacgaaagaccgatttcggacatcatcaagtttaacctgacaaaagaaggttatgaagtggttacggcttttgatggtcgtgaagctttggagcagtttgaagctgaaaagccagacttggtcatcctggacttgatgttgcctgaactagatggtttagaagttgctaaggaaattcgaaagacaagtcatacaccaattatcatgctctccgctaaggatagcgagtttgataaggttatcggactagaaattggggcggacgactatgtgacgaaaccattttctaatcgtgaattgttggcacgtatcaaagctcacttgcgtcgtacagagactattgaaacagcagcagaagaaagctctaactctggtaagcaggagatttcaattggtgagttgattattgttccagatgcgtttgttgctaaaaaacgtggaaatgaagtcgagctcacacaccgtgaatttgagttgcttttccatctggcaactcacatgggacaagtgatgacgcgtgagcatttacttgaaactgtttggggttatgactattttggtgatgttcgtacggttgacgtaaccattcgtcgtctccgtgaaaaaattgaagatacacctagtcgtcctgaatatattttgacgcgtcgtggtgttggttattatatgaagaattatgactagtattggcttaaacatcacaagctttgaactagccttactctttacgctcctttttgtggctttctactttatttttcttgcttatcgtgattatcgacaagtcaaaaatattcgaaagttgaccaagagggtcaagtccttaatggcaggtaactataatgaggagttacgcttaaagggtgatccagagcttttagagctagctgatagcttgaatgatttatcggacgtctttcgtttgacacatgaaaatctagcccaggaaaaaaaccgcttatcatcagtcctctcttacatgagtgatggagtcattgcgacaaatcgtcgtggtcaaattaccatgattaatagcacagctcagcgtttgttgaatctagattttgagacagcgacacagatgtccattttagacttattagatggtgaaaatccctacacctatagtgaattgctgtctaagactcctgaaattcatttgtctcgtcgagatgccaacgatgaatttgtgaccttacgcgttaactttgctcttattcgtaaagagtctggattcatttcgggtctggttgccgttcttcatgatgctactgagcaggaaaaagaagagcgtgaacgtcgtctatttgtttcaaacgttagtcacgagttgcgtacacctctgacttctgtaaaatcttatctagaggcacttgatgatggagctctcaacgaagatatcgcccctaactttatcaaagtttcgctagatgagaccaatcgtatgatgcgaatgatttctgacctcttggcactttctcgtattgacaataagagcactcaacttgatgttgaaatgactaatttcacggccttcatgacctatatcttgaatcgttttgatcaaatcaaaagtcaagaaagcaatactggtaagacgtatgaaattattcgagattaccctgtaaattctatttgggtggagattgatacggataagatgactcaggtcgtggataatattcttaacaatgccatcaagtattctcctgatggtggtgagattacagtgtccatgaagacaactgattcacagttgattgtttctatttctgaccaaggtttaggtatccctaagaaagatttacctttgattttcgaccgtttttaccgtgttgataaggccagaagtcgtgcccagggtggaacgggtctaggcttgtccattgccaaagagattattaaacaacataagggcttcatttgggctaagagtgagtatggtaagggttcaacatttacaattgtgcttccatatgacaaggatgccatgatggttgatgaatgggagatggagtagaaatgatctcagatttagggtttaaatatagtattttggcttcagggtcaactggtaattccttttacttggaaactccagagaagaagattcttgtagatgctggtttgtctggtaagaaaatcacaagtttgctagctgagattgatcgtgacccgagtgatttggatgcaatcttagtaacgcatgaacacaaggatcacatccatggcgtaggcgttttagctcgtaaatatggcatggatatctacgccaacgagaaaacctggcagattatggatagtaaaaatatgcttggcaagattgataatagccagaaacatgttttttctcgtgacaagcttctgacctttggagaccttgatattgagtcttttggagttagtcacgatgctattgatccacagttctatcgctttatgaaagatggaaagagttttgtcatgttaacggatacgggttatgtttctgatcgtatggcaggtattattgagaatgccgacggctatctgattgagtccaatcatgatgttgaaatccttagagcaggttcatatccttggtcaaccaagcaacgtatcctctctgatcaaggtcacttgtgtaatgaagatggagcggatgctatgattcgtaccatcggtaataaaactaaaaagatctacttgggtcacctttccaaagaaaataatatcaaggagttggcccacatgacgatggaaaatcagttggcacgtgctgactttggtgttggaactgactttaaagtttatgatacctcaccagacacagcgactccactgacagacatttaaaaatagcagaagagctgcactaatacgtttagtgcagctttttaaaaggaatgtatttatgaaagtaatttatctctcgttagggtttgtctcgctcggtttgggaattcttgggattcccctccctatcttacccacaacaccttttctacttttagccattgcttgctttgctagaagttccaaacgttttgagaaatggttatatcatactaagctgtatcaaagttatgtagccgattttcgagaaaccaaatcaattgccaaagaacgaaagaaaaagattatcatccaaatctatgttttgatggcaatttcaatcttttttgcccctatactatgggtgaaaatcggactcttttgcctgacggtcttcatcacttattatctctttaaggttattcctgataaagactaagctatcatcaaaaaatgagacttccaagatggagtctcattttatatattattaatgtttgctacgtaatttcttacggagtttataggcaaaattggctggtccgtatagagggctaactggaaggttgaattccccaatgaattgttcaatacgtgggttaaatttggacttgaaattatacaaaccaccatctagtgaattttcaattcctcccatgttttgccactcagcaccacgctcaaaagcatgattagctgtttcataccatgtcaagatagccggttgataacggcggtaatcttcatccattcctgcatagatattctcagatgtcttgccaaattcaagaacgagtgtacctgagagtgggaccgtcttatttccagcatcaaccttttcttgaaggaagtcaatttcttcttttagtcttttatgttcttgtttattgttctcgatttttcctggtttagttttttcagtaaacttggctgcatcagcaatgtttttttcgagttgtttattgagatctttgagacgggctggtaaatctagtgttgagagtgtaatgtaagaagactctgggtaagtagtcaacaacttttcataataatcgattccacgaaggtggatgttttttcgggcctctgtcttcttcatcagagaagcgaattgttcaagaagctcagtgccaccaaattggactgaaatccccttgtttcgagcagtacgaacagcctgcttggtgctcttagagagttgttcttcagtgaaatcttccttatggatgttagcctggaagcgaggttggatattttcagccatatcttcagtgaggcctgtccattcaacgccaagagcttggatgtctttggcaatcgccatagtctctttacggatttcagcttcttgtgaaatcaggttctttgtcacaaaaaggcttgggtcaaatttcacaaagagagcacgctttgttttggcatattttttaagtgaagccataacaaaggcgagcaaatctttatcttgataatccataataggtccacgaggaatataaatcatagaaaatccaagagggagtggctgaataaggacactagcgacagcaacgagattaccatcttgatagaaacctaggcggtcatttccccagctatccttgattttagcccatgaactactttgtaataagtttgtttgaggactatctataacaaaacggtcatgctcagaagtactgagtccagttttataggtatacatattattctagaacccactttctaatagcataagcgacaccagattcatcatttgattttgtgatgtgtttcgcaattttcttcatttctggattaccattttccataacaacaggagagccaacgacttcaagcatagcacggtcattttcttcatcaccgatagccattgtttcttctttagaaagaccgagtttctcagcaagatgggttacagcaattcctttgttggctgttttcttgaggatttctaggtaaaatggtgttgattttacaatagtaaagcggtcataaaattcctgtggaagtttggcaatagctgcatcaagaatttcaggttcatcgatatacatggccttaacgaattccttgtcagccacctcttcaggtgtacgatagtaaatcggcatatgaacaagtgtagactcatgaaccgtgtagcggccaatgttgcgattacttgtgtagataccatctttagtaatagcgtgagaatgaacaccaagcttgttagccaaaacctcaatgtcaaggtagtcttcgtatgagagtgtctcacgaattaattcattaccagtagaagtttcttggacaagcccaccattgaaggtgataacataatctccgtcttggttgaggttaagttcttcaagaagaggaagcaccccaggaataggacgaccagtcgcgataacaacctttacaccagcagccttggcatcttgaatggcttgaaagacttccggtgtaacttgacgttggctatttaaaagcgttccatcaatatcaactgcaataagtttaatagacataataattacctgtttcgtttagttagtttcccttctattttactaaaatttaggcgctttgtcatagttcttcctgagaaaagtgttattatctctttgaagaagtggattaggtaagaattgcccaaatgctttttaattggtaaaataaggtcagacaaataaaggagagataaagtgattcgagtaaccaaccaattgacggagcaagcacggaaggcagcaaaagcattgattgctagctgccaagcccatgaccaaacctttcgagaaccctatctctccaatatgcttaattttaatcccaatatgccggcctttttcctctattgtcaagagggagagttgcttggcttattaacggtttatgcggatgatgaagacattgaagtgagcatcctagtggatcctagtcatcgtcgtcagggtattgcgcgtgcgatgtatagaagctttgaaaaagaaatggcatcttaccctattcgctcagtgacctttcagacggagcgtgtttttctctatcatcatcctgatttggcaagtcattggggtttggttgaggatgaagagacggaaacctggctagggcgagatagaacaccatatgctctggattcccgttcagatgtcaaggtgctcttagctgaaccttcttacctagatgcaattgcccatctccatcaccaagccttttctgatgcagaggaaacactcgaagtaagtcgcagatacattacagaggcactgaaggactctgatggcctactttacatcctcctcaaagaaggtcaagtgattggagtttgtacggtcgatttatctgggaatagcaactacctttatggacttgccgtagcagaagcctatcgtggcctaggctatggaagctatctggcaaaatcagtcgtcaatcaactcattgcgcaaaatgacaagtcctttcaaattgcagtggaagatagcaatgtaggtgccaaacgcttgtatgaaaagattggctttgtcaaacaaacccaggtggtttacttgaagcagaaagggtaaacgcaatgttgaaactctctttgaggttagagttgctatcgtcttaagtaaaaagtagttatagaacagaaaggagtaatcaatggaaattaaaatcaaaaacaaaattaaagtaggcgatcaaacggaaattatcgaagaaatccacacttgtgaggttatggaaaaaggggattatacctatcttgttcatcataattccgagaaagaaaaagtggttattaagttgaatcaggatgagctagtgatgacacgcttttctaatcctaaatccattatgcgtttttctgctaaagtacctgccttggtccacattccgacaccgcttggtacccagcattttctgacagacactagtttatttgcccatgactctaatggacagacagttgatattcattatcaattgaaacatccagaaacagaagatgtttttgctgattatgaattagaagtttcttggttttaatttttgaaaaaatagaatcattttgcttgaataaagaataatttatgataaaatgtttagtacaaataagggagtagcaggtgactgtaatcatgagatttgattaacagttgcgattatgtcgtcattacgaaattttatatttccggcatattcttaaacagcgagacttgttttttattaaacaagtctctttttgtatgattttttatataaaaagagtcttgttagccatttttccctatatagaaggaggagattattttgtctaaagaacaaagtaaaaccttgttttacacacaaggagaggaagaagtcctaaaaaacttggacacttctgttgatggtttgtctactgcacaagccaaggaacgtttagatgcctatggctataacgagttggatgaaggtgaaaaacgcagcctcttgtcaaaattcatcgatcagtttaaagatttgatgattatcatcttgcttgtcgctgccgccctttctgttattacagaaggtatgcatggtttgacggatgcctgcattattttagccgttgttgttttgaatgcagcctttggtgtttatcaagaaggacaagcagaagcggctattgaagccctcaaaaacatgtctagccctatggctcgtgtgcgccgtgatggccatgtcgttgaaattgattcacgcgaattggttcctggagatatcgtcttgcttgaagcaggtgatgttgttcctgcggatatgcgcttgctcgaagctgcctcacttaagattgaagaagcagcccttaccggtgaatccgttccagttgaaaaggacgttaccgagacagttgaagcagaggcgggtatcggtgaccgtgtgaatatgggttaccaaaactctaacgttacttatggtcgtggtactggagttgtaaccaatactggtatgtatactgaggtcggtaagattgccgatatgctggctaatgcggacgaatcacaaacgccattgaaacaaagcttggagcaattgtctaagaccttgacctatctgattgtcgctattgctttggtgacattcttggttagtgtcttcattcgtggcgaacagccccttgaaggcttgatggttgccgttgctcttgcggttgcagccattcctgaaggtttgcctgccattgtaaccattcttttgtcacttgggacaacgacccttgctaaacgcaattcgattgttcgtaaattgccagctgttgaaacccttggttcaacagaaattatcgcatctgataagactggtaccttaaccatgaaccaaatgactgttgaaaaaatctatacaaacggtcaattgcaaaacgcttctacggaacttggtgctgacaatacaacccttcgtattatgaactttgccaatgatacaaagatggaccctgatggtaaattgatcggggatccaacagaaacagctcttgttcaatttggtttggaccacaattttgatgtgcgtgacgtcttaaaatcagagcctcgtgtggcagaattgccatttgactctgaccgtaagctcatgtctactatccacaaagaagcggatggtacatactttgtagccgttaaaggtgcgcctgaccaattgctcaaacgtgtgactcgtattgaaatcaatggtgaggtccgtcctatcacagatgaagataaacaagctatccttgcaactaataaggacttggcaaaacaagcccttcgtgtcttgatgatggcttataagacaacgaatgacattcctaccttggaatctgcagttgttgagtctgatttgattttctcaggtttggtaggtatgattgacccagaacgtccagaagcagcagaggctgtccgtgtcgctaaagaagcgggaatccgtccaattatgatcacaggtgaccaccaagatacagcagaagcaatcgctaagcgtcttggtatcatcgatccaaatgatacggaagatcatgtctttactggcgctgagcttaatgagctttctgatgaagaattccaaaaagtcttcaaacagtactctgtctatgcgcgtgtgtctcctgaacacaaggttcgtatcgttaaggcttggcaaaatgatggcaaggttgttgccatgacaggtgatggggttaatgatgcgccttcacttaaaacagctgatattggtatcggtatgggaattacaggtacagaggtttctaagggtgcttcagatatggttcttgccgatgataactttgcgacaattatcgttgccgtagaagaaggacgtaaggtcttctcaaatattcaaaaatcaatccaatacctcttgtcagccaacatggccgaagtcttcattatcttctttgctacactgtttggttgggatgtgcttcaaccagtacaccttctatggattaacctagtcactgatacacttccagctatcgcacttggggttgagccagctgaaccaggtattatgactcacaaacctcgtggtcgccaatcaaacttctttgatggtggtgtcttcggagcgattatgtatcaaggtgtcttccaaactatccttgttcttgcagtatatggttggggccttgccttcccagagcactatacgcaagcagaaattcatgcggatgcccttacaatggcctttgccacacttggattaatccagttgctccatgcctttaacgttaaatcagtttatcaatcagtctttaaagttggtctctttagaaacaagactttcaactgggcaattccagtagccttcgttcttttgatggcaactatcgtagttcctggatttaataaccttttccatgtgtcacaccttagtctgacacaatggcttgcggttattgtaggttccttcttgattgtggtattggttgaattagtcaaagctattcaacgtgcccttggtaaggataaagacgctatttaaaacataaagtcagagataatggtctctggctttttcttatcacatcttgaattcaggaggagtcttgtttataattgaagagaaatgatcacaagttaaggagaaggccatgaacgagaccattaagacacaactcaatcaccgcagcatccgtcaatttaaacctctagctttgacacaggaagaagttgaccttctggttgatgttgccagacatacggcaactagtaattttagacaatcctattcgattatcagtattactgatcaaaaattgaaggaagaaattgctgaaattgcgaatcagccttatattccaaatgctggtcatctttttgtatttgttgtagaccaaagacgtaacactctgattgcagaggcaaagggtgctgaagccttagtgcaaggtagtcccgaacgctttatctcggccttttcagatgcaatgattgctgctcaaaatgtggtagtagctgctgagagtttaggtatgggaacagtttatttgggtagtatcttgaatgataatgccaagctttcggagcttctcaaacttccaaagtatgtatatcctgcagtaggcctagcagttggttggccagatcaggaaccacagctaaaacctcgtttgccacgtcacgttatccatatggaaaattattatcaggatttggaaaaacccttggaggagctaaaagattacgacgctgaagtccatgagtattacgacctccgcgacctcaataatagggttgatgagtttacgactcagattgctaagaccatggataaatccgttgccaatcgtgctaataccttgaaggaccttcaacagcagggatttttcatggactaaaaaacgactcccataagagtcgttctacaaatcaaatagtgtcatagaggaaaggaactcatttgctagttcctttttttcatactctaaaaactcttgtcgtttcttgactaggttgtaacgcttggataggttccatgttccagtaggattgagttcggggtgattggaaacaaaatcaatggttaagtcccattctcgtctgtatccaagaggacgagagtgatagcttacaccatcaattgttaccgtcccataactgcggtgggcatgaccaaaaacaacatctttaacaccatgtttgacgaaaatctgatggaattgttcagatcctaaataagcgttaaaaggtttaaaacgttcgtgcgtcatggtgaaacgaccatgaggaacgaaatgcatggcaactataaggttattcgtgtctaaatcatttagaatattatctagcttctgtagactagtttgacagatttcggaatctgtacccaatcgtttaagtcgtcggtcgaaccagagttgcttcttacgtttaagaatcttatctaatttttcattagaataggaataatcataccacccatgaaaagccaataatatcttgctacctaaatcaatcacctgaaaatcaagattatcaataagcctatcttctaaatcaagcatatcatgattgcctaaattataggtaaccttgaccgccttagacagttttcgtaggaaaggtttcgtgtcagcataataatgattagaaatatctccggcgatatggaggtggctaacttcttgatcttttagacactttataagagtatcgatttcatatgtttcaaagtgattcaaatcaatatgtaaatcactcattactgcaagtcttgtcataaaaacattgtaacaaaaaggtgaaggcttgtctgtaaatgaagatgatggaaaatacttgcccttagactacattttcattatgataagaatatggatatcaagttagaaatacaaaagatggccaaggagattggcatctcaaaaattggttttacaaccgctgatgatttcacctatctggaaaaatcccttcgacttggcgttgaagaagggagaacgacagggtttgaacataagaatattgaagaacgtatttatcccaaattgaccttggaatcagctaaaaccatcatttccattgcagttgcctatccacataagttgccacaacaaccacaaaaaacagagtataaacgtggtaaaatcactccaaattcatgggggttagattatcactatgttttgcaggacaaattgaagcgtctggcagaaggcattgaaaagctgacggaaaacttcgaatataaaggtatggtagacactggagccttggtcgatacagcagtggccaagcgagctggaataggttttatcggaaagaatggactagtgatttcaaaagaatacggctcctacatgtatctcggtgagcttatcactaatctagagatagaacctgatcatgaagtagactatggatgtggggattgtcgtcgttgtctggatgcttgtccgacatcttgtctcattggcgatgggactatgaatgcccgtcgttgcctatcctttcaaacacaggataagggtatgatggatatggagtttcgaaagaagatcaagactgttatctatggttgcgacatttgtcagatttcctgtccatataacagaggtattgacaatcccttggcttcagacattgaccctgagcttgctatgcctgaattgcttccatttttagagctgaccaataagtcctttaaggagaaatttggtatgattgccggttcatggcgagggaagaatattcttcaacgtaatgccattattgccttggccaacttacatgaccgcaatgctattgtcaaactgatggagattatcgataagaataataatcccattcacacggcaactgccatttgggctctcggagagattgttaagaagcctgatgaggctatgttagactatatgcgggaactgtcacctaaggatgaagaatcccaagccgagtgggagcttgtgtgtgcaaaatggcaaatttaagtgatttatgctagaattaagcataatactataaaatggaggaaacctatccatggaagtggcagaaattcgccaaaaaatctctgaaaatcaagagaagctcgtgagcttcgggaggtctctttgacttagatcgtttggaagaggacattgcgctccttgaaaaccgaatgactgagccagatttttggaatgataatattgcagctcaaaagacttcacaagagttaaatgagctcaaaatgaaatacgaaactttcaacaatatgcaagaactctctgacgagacagagctttatttagaaatgttggaagaagatgatagtgttcaagaagagctggaagaaacgctcgaaaaacttgataagattatgacaagttacgagatgacactgctcttgtctgaaccatatgaccataacaatgccattctggaaattcacccaggctctggtggtacagaagctcaggattgggctgatatgttgctccgtatgtaccaacgttatggaaatgccaaaggtttcaaggttgagactttggattatcaggctggtgatgaagctggaatcaaatctgtaacccttgcttttgaaggacctaatgcctacggattcctcaagtcagaaatgggtgtccaccgtttggttcgtatttcaccatttgactctgccaaacgtcgtcatacctcattcacatctgtggaagttatgcctgaattagatgataccattgaagttgagattcgtgatgatgatatcaagatggatacattccgttcaggtggtgctggtggtcagaacgtcaacaaggtttcaactggtgtgcgtttgacccatattccaactggtattgttgttgcttcaacggttgaccgtacacaatatgggaaccgcgaccgtgcgatgaagatgcttcaagctaaactctatcaaatggagcaagaaaagaaagcagaagaagtgaatgctttgaaaggtgataagaaagaaatcacttggggaagccaaattcgctcatatgttttcacgccatataccatggttaaagatcaccgtacaggctatgaagttgcccaggttgataaggtaatggatggggatattgaaggcttcatcgatgcctacctcaagtggcgtatggaagaatagtaataacatacttatttcaagtattaatatactctatctcaatgaaaggaaggcgttcagctactttagtagttgaatactgacattatggctcttattgaattaaaagatgttactaagaagtatgataagtcaacaacagcccttagacacattgatttgtctgttaactctggggagtttgtttacttagtcggcccttctggtgctggtaaatcaagtttaattcgcttgttctaccaagaagaaaaattaacgagtggttctatgaaagttggagagtttgatttaacccgacttcgtaagaaagatgttccactcttgagacgttccattggagttgttttccaggattataaactccttccaaagaaaacagcttttgaaaatgttgcttatgctatggaagttattggtgagaaacctcgtcatatcaagaaacgagtggcagaagtactcgagttggttggtcttaaacacaagatgcgttcatttccaaatcaattgtctggtggtgagcaacagcgtgtcgctattgcgcgtgctattgtaaataatccaaaagtgttgattgcggatgaaccaacaggaaacttggacccagagatttcttgggaaattatgcaggtccttgaacgtattaacttgcaagggactaccattataatggcaacccataactcaactatcgttaataaccttcgtcatcgtgtcgtagcgattgaggaaggacgtattgttcgtgatgaagaggaaggagagtacggttaccatgattagacgctttttccgccatttaggagaatcgattaagaatctcaaacgtaatttgttgtcgacactgacggcagtattttcggtaatgattgttctttcacttttaggtgtctttggctctgttatcttaaatacacagaaattggcttcagatattgaaaagaacattcaggtcaatgtctatttggatccagattcatcagatgcctcgaaaacagtcaaagaactttctggacagattgttgctaataaagactaccataagatttatgatgctttgaccaaaatcaaaggtgtagataaggttactttctctagcaaagaagaacaaaagaaacaactcattgaaacaatggggtcaagtttcgaaacagcgacaggggatgctaacccactatctgatgtttacattgttcaaacgaaatcaccagatgatgttagtcgagttgctaaggaagctaaagccattcagggcgttgataatgctaactttggtgggtcagataccgaaattctgatgtctactatgaaacgtgttcagttttggggaatcattgccacagcacttttaaccattgtggctgtcctattgatttcaaataccatccgtattaccattatgtcacgtgcgactgaaattcaaatcatgcgtttggttggtgccaagaattcatatattcgtcgtccctacttgatggagggtgcttggattggtgcgcttggtgctatcattccttcaggcctcatttatcttttgtatcacatggtatactcatctttgaaccctgattttgtcaaaggtggtatttcgatgtatgatccagagtggtttgtctatgcggttatcggaaccctctttgcagtcggtatcattatcggttcgattgggtcacgtatggcaatgcgccgttatttgaaatactaaagagattaaaggagaaccaatctggttctctttttgtttgtcaagagaataagaaaatcagattttcaactatatctcaaaatcgtttgctcaaagcccaaatccaatcccatatttggtataatatttaaaaaacattggaaaagagatgcattatgacaaagttagctaccatttgttatattgacaatggaaaggagcttttgctcctacatcgtaataaaaagcctaatgatgttcatgaaggaaagtggatttctgttgggggaaaactagaagcgggagaaacgcctgacgaatgtgctcgtcgtgaaattctcgaggaaacccattttacagtgactgagatggattttaaagggatgattacctttccagaatttacccccggtcatgattggtatacctatgtctttaaggtaactggttttgaaggagaactcatctcagatgaggagtctcgtgaaggaacgcttgaatgggtaccttatgatgaggtcttatctaaaccaacttgggaaggtgactacgagatcttcaagtggattcttgaagataagcctttcttctctgcaaaatttgtctatgattgtaaccaaaacttagtagacaagactgtaaccttttatgataaatagggaggaactatgaagcgtaaaaaaacagaacatttttcagaaacatggttttttaagtggatattgaataatcaggctgttgtagcctttttcatcttacttttgattggtttgacggttttgattttcacaaagataagtcctattttttcacccgtcattcagtttatgaccattattatgttgccactggttatttccatgctcctttattacttaataaaacctttggtactacttgtagaaagaaccggactaaaccgaaccatgtctatcttggtcatctacgctattcttggcttgctcttggtttgggggatttcgacggctattcctagcttacaaaatcaaattttgatcctaataagaaatgcaccatcatatattgcacgtgctaatagtgagacggaacgttggattaatcttcctattctttccaatttccacggtgatctagagtccatgcttagtgatttctcagcgagaatggtcaactatgctgagaacttttcttcgtcggctttgacatgggttgggacttttgcaagcactgtagcaagggtgacagtagctattattttggcacctttcattctcttctaccttttaagagatagccaaaagatgaaacatagctttgtctcagccttaccaactcgctttcgtgaaacaactgttcgtatgctttcagatataaatagtcagcttgaagggtatgttcaaggccaggttacagtcgctattgtcgttgccattatgttctgtattatgtttaagattgtaggtcttcgatatggtatgacttttggtattatggcaggttttctaaacatggttccttatctaggaagctttcttgctatggtaccagttgtaatcatgggactggtacaaggacctgcgatgttgattaaggtcctcatcattttcttcattgaacaaaccattgaaggacgttttgtttctccactcgttttgggaaataaactaagtattcacccgattaccattatgtttattctcttgacagcaggttctctttacggtgtttggggcgtcttattggggattccaatttatgcttctgtcaaggttgttgttagagagatttttgattggtaccgttctgtaagtaatctttatcaagatgatttagaaaatgaaggacaaaaagacgatgttaaatagtgaaaaaatggttgcctctattggaaaccaagatttagaccacgcggacaaatattttaaaaaagctttacgagaggaccctgcagaggttcttgttgagttgggccaatacttagaatctattgggttcttaccacaggcacaggaaatttatgaaaaagttcgctttgattttccagaggttaatgtcaatctagcacaaattgctgccgaagatggtgatattgaagaggcttttctctatttggatgccatacctgaagactctgacgactatttgtctgctttaattgtaaaggctgacctctaccaaatggagggcttaactgatgtggcacgtgataagttgttggaggcaagtcaattatcagatgactcattgattatttttggtttggctgagatggagtttgaacttggaaattttgaacaagctattcattactatgctaaattagataatcgtgaccttcttgcgatgactggcgtttcaacttatgaacgcattggtaaggcttatgccagtcttggaaagtttgaagttgctcgtgaatttttggaaaaagctattgaaattgagtacgatgataccgttgcttttgagttagccactttgctctatgatcaagaagagtatcaaaaagctaatttttactttaagcagatagaaaccatgtcttctgacttcgaaggttatgagtatttttacgccttgtccttacatgcagaacataaaactgaagaagcattacgtatggcacaacaagggatttcaaaaaatgcttttgatgttcaattacttttgttagcatcacagttatcctatgagttgcatgacactcaatctgctgaatcttatctgaagcaagccttaccactcgctgaggaccaagatgagattgttctacgtttaagtactctctatttagaagaagaacgttacgaggatctagtagctttagccgattacgaagttgattctgttttggctcgttggaacattgccaaggcctaccaagcacttgatgatgaagaagaagcctttcaaatctatcaagatttggctacagatttatctgaaaatcctgaattcctccatgattatgcatatatcctgagggaatttggttacagagatcaggcgcgtgcaacggcagaaaaataccttgccttagttccagatgatgtcaatatgcaaacatttcttgaggattattaagctgcgaaaggctttaatccttggtttaaagagagggagagatacattgagcttgttcgctccctctttttttatttctctatttatgttatgattttattagaacccataaggagtaagtatggttaagagagatttaattcgaaatattatcatagcagttcttgccattgtagtgattttgttgttaagagcatttgtcttttcaacacaccgtgtgactgaaggtcaggcgaatgactatattcatgctggtgattatgttactttcaataaaaatgttgaacctcagaaaaaagattttattctttatacagttaatggcaaggaatatattggtcgtgttattgctgatgagggcaagagcgtgacagctatggatgatttcctttatgtcaatgataagtcagttgacgaagcctatattagcaaggataaatcagcttatttggcgacagtttcacctggaaacttcttcactgatgatttttccattgcaacattgacagataataaacaaactaagattgaaaagggtcaatatcttgtactgaacgataaccgtcgtaatacagatgatagtcgtaagtttggtcttattgaaaaggaccaaattaagggtgttatctctttcagattgtatcctctatcacgttttggtttcgttgatgtcgattaatatttcaatactactaaaaaagctaggaacttttgacaagtttctagctttttttgcgaataaattggtgaaggtttattttaagactttatgatgctgatagtttcatcgtcttaaaatgaatcagcagaaattgtaagtagaaaaggaaattaagatgcaattaggatttcattttggatttaagaaaagcaaagcttatggactgtgcggtgttatgctagcaatcttatttttaggcatgtctggtcactcggctaaagcagatgaaatgttatcaccaactgacacatcttcaactttgaaagaaagtacagataatcatgcgacaagttattctgaaataggagtacacgatgattcaacgagtcaaatgaatctacaaagtgaaagggtattagaggagaagcaatcaagtctggcagattcttcaaaaatagctgtcttaaccaatagttctgtgaccacaagctcttatcaagaggcagatgatcttagcgaaattaatcaaaatcaaagtcattttcttagtgccattaagcaaggagctatggatggagccaaggaaggagtccttccctctattacggcagcgcaagctatcctagaaagtggttggggaagctctgaacttgctaaggctcccaacaataatctttttggcattaaagattcagaagactggaatggagaaatcgtgactgtgcctacccaggaatatgttaatggtgactatatcaagatcaatgcagcttttcgaaaatatacctcatggaatgatagcgtagtagaccatgcaaaatttttcacgagtaccgagtggcgaaaaaacaattaccgaaaagttgtgaatgaaacagattatcgcattgcggctcaggaactgaagaatgcaggatatgcgacagatccaagttacgctggaaaacttatctctttgattgaagcctataaactttatgaatgggatgcagtgagcaatacgaccaactccgtcctagagaatgaaggagtagagagtcataatcctaaagccgaccttgccatcactggtctcaacaatgctactggtagctatgatcttgtcatttcaaatttagttgcgccacgaggcttcaaagaagtcttggttccaacctggtcagaagagaacggtcaagatgatatcatctggtacaaggcagctaagcaagctaatggagactataaggtaaccgttcgttcaagcaaccataagggtgatagcggtctgtataattcccatgtttacttggttgataatgacggtaaatatattggccttggtggcaaacaagcaacacttgatatcactaagactcaaggaactttaactattgccaataatgataaaaatcgtggaacctttgatgttcttatcaccaacctgacgaatccaagcggtatttcaggtatccttatcccagtttggtctgagcaaaatggtcaggatgatcttgtttggcataatgctacaaaacaggataatggttcctacaaggtgacgatttcagccagtcaacacaagtggaattcaggcaagtacatcgttcatggctatattgttgatgcttcaggtaagaatatcggctttggggcaacttcagctgatgtggtagcacctaagaaaatcggttcagcctcaagaggaaactacgatgttttaaataagattgtttacctcgatgctggtcatggtggctatgatccaggagcttcgtactttggtatctctgaaaagagcttgactttggctatccaaagtcgtgtgaaagctaaactagaagcagaagggtatcaagttgtaaccactcgcacaagtgatacctatgttgatttgatagatcgttcacgtgcagccaatgcttctgaatctgatatcttcgtaagtatccacatcaatgcttcaggaagttctgcagcacagggtattgagacttattattaccaaccttacgcagaatacccatcacgtattaatgcaacctaccatgctaatccaactcgattgagcatgagtgacaccttggccaatgctatccagtctagcctgattaatgcgactggagcacagaatcagggcgtgaagcgtcaaacctttgcggtcttgcgtgagacgacagctccggcagtccttcttgaacttggtttcttgtcaaatcctcaagaagcagcccgtttgaatacctctgcttatcaggagactttagctaacgcaattgtggcagggattaagtcttactatgaaaaagaatctaaagtttaagttatacgttaacccatcattatgatgggtttttatgctataattgaggtaaatactaaatacaacaaaaggagtgcttatggtctacgatttactcttagagcgttttttacgttacgtcaaaatcaatacacgtagtgatgaaaatgcgacaagaacgccaacaacacaaagccaggtggattttgccttgaaggttttaaaaccagaattagaagaactaggtttaagtaacatccattatttggaaagtaatggttacctagtggcaacccttccggctaacgatgaccagttaacacgtaagattggttttatctctcatatggatactgctgattttaatgcagaaggagtgtcaccacaagtcattgactcttatgatggaggtatcattcctcttggaaattcaggttataacctagacccagctgattttccaaatctcaagaattatgtcggtcagacacttattacgacagatgggaccacccttcttggagctgatgataagtctggtattgctgagattatgacggctttggcttatttgaaggctcatcctgaaatcaaacattgtgagattcgtgtaggctttggtcctgatgaagaaattggaatcggtgcagataaatttgatgtcgaagattttgatgtcgattttgcctacacagttgacggtggacctttgggtgaattacagtatgaaaccttctctgcagcaggagcagaacttaccttccacggacgcaatgtccaccctggaacagcaaaagaccaaatggttaatgccctgcagttggcaattgattttcataatcagttgccagcagaagaacgccctgagttaacagatggctatcaaggtttcaaccatcttcaaaccatgacaggtactgttgaggaagcaaaatcttcttatatcatccgtgattttgaaacagagtcttttgaaaatcgtaaagcagtcttccaaaaaattgctgacgaaatgaataaaacttatggtcagacacgagttgatttggttcttaaagatcaatactataatatgcgtcaggtgattgaaaaagatatgacgcctgttgagttagcaaaagaagtcatggaagacttagatattacgccagtcatcgaaccaattcgtggtggaactgacgggtctaaaatttcattcatgggcattccaactccaaacttatttgctggtggcgaaaatatgcacggtcgatatgagttcgtttccttgcagacaatggaaaaagccgtagatgttattcttggaattgtcagtaaaccttaattgagcttgctaaatactgattttatggtaaaattagaagtaatggaggtgctgagatgattaaaattttcggcaagtatcgttaccattggcaacccgaattatcttggctgattatctactggtctttagccattacgccaatctttattgcggcggcccttctattcgagttgtactcggtgccctcacatattttgatgctcttcactattttcgttgccttatttggtttaggtttccatcgatactttattattgaagatcatgggattctgcgtattgtttctttcaatatttttagaccacgcaaagtgaaaattagtgatattgaaaaagtcgaagtgattaaaactggcttgtgccttatttttaaaaatggtaaaaaacgtcagttttatatgagaaagtggcctaagaaatatttcttagatgcattagcccttcaccctgatttcaaaggtgaggtagagttattggatcatatgacaaactttgattactttgccttttatgaggaatcaaaaaaagccctgaagcttaaacttcgcaaataagggctttagtgggacaagacttgacggcagtcaaagtctcagggctattttcaataatttgattgagttggtcgctgtctctgaacctaacaataccttcgtcatcataatcaaagacgggagagtaggtttggcacaaaccacaagcgatacatttttctggaattaatgatactttcatagtattattttaaaatagatttattgtttttacaaggagaatatcatgagtaaaaaaccatgggaagataaggtttctgacgaagagttggaagaagtagttgacgctgattttctagatgatgaagatgagtttgaggattatgaagaagaggaggatgtcactccttcagatgaaaaacgcgaaaaaggtggtggattcattaattcatcattcttgacagtcttgcttggattattctttgttattgttgtatgtattttgttctttgttttctatacttcaaatgttggtggaaacaaaactgcggaatctaaggaatcatctggattctactcatcttcaactagcaaagttgttaaatcttcatctagcaagaaagactcaaacaaagatgaggaaagtgagaaatctactacagaaaaatcttcaaaagagaaatcatcttcaactaaagcatcaagctcttctaaacatgtagaaaaagaagatgcaactgagtcagctgagacagcaccatcaagtgctacggcagcagcagatggttcatcaattgttgttcaatctggtgaaggtgctggttctatcgctgcacgtgcaggtatctctgtagatgagttggaacgtcttaaccctgatcacatgacaagtggttactggtatgctaacccaggtgatgtggttaacgttcaataattttaaaagcaaaggaacatcatgaaagatattagaattgctattgatggtcctgcgtcaagtggaaaaagtacagtagccaagattattgcaaaaaatcttggctatacttatcttgacacaggtgctatgtaccgatctgcaacttatttggccttgcagaatggtttgactgaggaaaatgtaccagaaattttggagcaactatctcaacatccgatttcattcggaaaagctgcagatggtagtcagcaagtttatgtaggtgatgttgatattacacacccaattcgtgataaccaagtcacaaataatgtttcttgggtagcagccattcctgaagtgcgacaagaactcgttgcccaacaacaacgtattgctcaagatggtgctattatcatggatggtcgtgatattgggaccgtggttttgcctgatgcagaactcaaaatcttcttgattgcttcagttgatgaacgtgcggaacgccgttataaggaaaatatcgaaaaaggtattcctgctgaccttgagactctaaaaaaagaaattgctgaacgtgactataaagatagtcatcgtaaagtttcacctcttaaaccagcggaagatgccatcacttttgacactacaggtgtatctattgatggtgttgtggaatttattcaagaaaaagcaaaaaaaattattgacaaaggatgactcacttgttatactattaacaatgagaaaagcagaagtgagaacttctcgccttgcgacttaggttgtctggcccaacatgtcaaatccctataggggtattatgtgtgcgggcttgtatatcaagtccgctttgtttttctctaaaaaaataaagaggtgaagatcatagctaagaaagatctattcattaacgatgaaattcgcgttcgtgaagttcgtcttgttggtcttgatggtgaacaattgggaattaaaccattgtcagaagcgcaagctattgcagatgatgcaaatgttgacttggttctcatccaaccacaagctacgccacctgttgcgaagattatggactatggtaagttcaaatttgagtatcaaaagaaacaaaaagaacaacgtaagaaacaaagcgttgttaccgttaaggaagttcgtttgagtccagttattgataaaggtgactttgaaactaaacttcgtaacggacgtaagttccttgaaaaagggaacaaggttaaagtttctatccgattcaaaggtcgtatgattactcacaaagaaatcggagctaaggtcttggcggaatttgctgaaaaaacgcaagatattgcgattatcgagcaaagagcgaagatggatggacgtcaaatgttcatgcaacttgcaccaattcctgacaaaaaataattgtcaaactaacactattttaagaggagaattttaaaatgccaaaacaaaaaacacaccgcgcatcagctaaacgtttcaaacgtacaggttcaggtggattgaaacgcttccgtgccttcacatctcaccgtttccacggtaaaactaaaaaacaacgtcgtcaccttcgtaaagcatcaatggtacattcaggtgactttaaacgtatcaaatcaatgctttcacaaatgcgttaatccgctaaaagcattacaaattaactaaactagaaataattcggaggaatatataaatggctcgtgttaaaggtggcgttgtatcacgcaaacgtcgtaaacgtgtattgaaacttgctaaaggttactatggtgcaaaacacatcttgttccgtactgcaaaagaacaagtaatgaactcttactactatgcataccgtgaccgtcgtcaaaagaaacgtgatttccgtaaactttggatcacacgtatcaatgcggcagctcgtttgaacggtttgtcatactcacaattgatgcacggtttgaaattggctgaaatcgaagttaaccgtaaaatgcttgctgatttggcagttaacgatgcagcagctttcacagctcttgcagatgcagctaaagcaaaacttggtaaataagaattaagatgggttttacccatctttttttgtggaggtaataatgattcgtttagcaaaaactgaagatattccgagattacaggagcttttagagcagattcttattgttcatcatcaagcacgtcctgatgtttttaagtcagaaggcagtaaatttacagatacagagctagaagaagtaattaataatccaaataaacctatttttgtttatgaggatgaagaaggacgtattttgggtcatcttttcttaattataaacgaagtatctgagaaggacggtgcgcaaaaggctcataagtctcttttcatcgatgacctatgcgttgataaggaagctcgagggcaaaaattaggtgagaagctttatcaatttgccttggactatgctaaggaactaggttgttataatctaacacttcatgtatggaatgataatgagggtgctgtacgtttttacaaacgtttaggtatgaaaccgagatatacagaaatggaaacaatcctaaaataatacgttttcatgagagaaatttaacttacgaggaataaatttttttgatatgctgaaagagaacctttagaaatggagaaatttaatgcctcgtaattttaaagaagctttgctttttacgattttaatgtgtggaatgatggtttgtgggatgagtctctggaatcttctcatccttgattggactggagtagttccctttgcttggggtcactttttccaaggatatcttcctggatttgtagttgctttcttactggatatgcttttggtaggaccactagccaagacaattgcatttgctattttacataaagtaaaagcccatgataaacgatgggcgaagattttggtgatttctggaactatggcgctattcatggtaacctttatgtcgctctatggcttagtgtacaacggtcagtcagtgacgctatcatcctatggccgtgcttggttgacaaacgttatcatggctttaccacttaattttttagtagttggtcccatctcacgttttattttgggcaaactacaaaaaccattgcctggtaaagaagtcgtagagaattttgaagatgatgacgaattaccaacgataatttaagtatagaactggagtttctctccagtttttttatattaaaagcagccacggatgtgactgcttaatgatgattagtttttctttttcatttcaccatgtgggtagtaagttccctctggcatatcgttaatgaaaacatgaatagcttctttaggtgcttttgcaacacgtgatacaacctcagtaacttcgcgagcaagttcgattttttgttcttcagtacgaccttcaaagagatcaatttttacaaatggcataatgcatctccttagttttgatagtcctattatagcattaattaagagaatattctaaagttcttggaaattcttgaaatgataatattgcaatgctacaatatgagtgatttcaatagtagagcctaaagtaaaaagaggccggtagctaagagaaagcgtttctagttgaaagcaatagtattacttttgattcgattattactgatttaagaaatgtttcacatgctattcaaaatggtaaggcgtcttgtgatgatgagtaagtgattgtattttctttataaaggatgaaaactcttactaaaaatggtaaaataatgctaactagagacagtaaggagtaaattatgacaattgattttcgtgccgaagttgataagcgcaaagatgctttgatggaggacctttttggtcttttgcgtattaactcagaacgtgatgatagtaaggttgatgataagcacccatttggtcctggaccagtaaaagctttggaacattttcttgctttagcagaacgtgacggctataaaactcgtaatatcgataattatgctggtgactttgaatttggtcaaggtgatgaagttttgggtatctttgcacacttggatgtggttccagctggtagcggttgggatacagatccttatgaacctgtaatcaaagatggcaaactttatgcccgtgggtcatcagatgataaaggcccaacaatggcttgttactatgccttgaaaattattaaagaactcgagcttccagtatctaagcgtgtgcgcttcattgttggtactgatgaagaatctggttggggcgatatggaatattacttcgctcataatggattaaaagatcctgattttggtttttcacctgatgcagaattcccaattatcaatggtgaaaaaggtaatattacagcctatctccattttgaaggtcaaaatgatggggactttagtcttgtgtcctttaatggtggtttgcgtgaaaatatggttcctgaatcagcaagtgcagattttactggacctatcactttgaaagaactcgaggccaaattagcagactttgttgtggaacaagaagtaactggtcaagtgaccgaagaagctggtgttttccatgtgactattcatgggaaatcagctcatggtatgatgcctcaaaatggtattaatggggcaacctacttggcactcttccttagccaatttgatttccaaggcaatgctaaaacgtatttggatttaattgctgaaacacttcataaggatttctttgctgaaaagacaggtcttgcatttacagatcctaagatgggtgaattgaccatgaatgcaggtgtatttaacttcgctaaggaatcagaagataatacgattgctctgaatttccgctatcctcaaggggttgatacggatgctattaagtctgatcttgaaaaactcgaaggtcctaaggcggttagtctctcagaacacggtcatgtgccacactatgtaccagttgatgatcctatggtagagactcttctttcagtctatgagaaacaaacagggcttaaaggtcatgaacaaattattggtggcggaacatttggacgtctcctcaaacgtggtgttgcctatggagctatgttccctggttatgttaacacgatgcaccaagcaaatgagtttactgaggtcgaagacttgtaccgtgcagctgccatttatgcagaagctatctatgagttaatcaaataaaaaagagagacagttttgtctcttttttgaggaggaaaatatggaaacacttgaagaattaacgcaagcaatcatgtccgatgaacaaaataaagcttttacggaacaaggtataaaacccttgtttaccattccaaaaacggcacgaattaatatcgtaggacaagctcctggtattcgtgcccaagagtccggcctttactggaatgatcctagcggtgataatctcagggattggatgggtgtttcacgcgaagaattttatgaatctggcatgtttgctattgtgccaatggatttttatttcccaggtcatggtaaatcaggtgatttacctcctcgcaaaggatttgcagacaagtggcatgagaaagttcttgctttagctcctgatattcaattgacgattttagtaggtaactatgcacaacgttactatttgcatcaaaaatcatcggcaaaattaacggatacagttaagcattacaaagattaccttccagagttttttcctctcgttcatccctctcctcgaaataatatttggcaagccaaaaatccatggtttatggaagaagtagttcctgatttgaagtccttagtcaaaaacatcttaagtcaatgatttctgatatctgcacttggattgtctttaggtattgttatcaaatcaatgaagcaagtaacagagctatccaaatgatataaaaatttgagccccttggggcttttttgattctataacaaaaatagttgcaaaaataattaacgaaattttaatacttagcttatataatgcaatttaattctaattttcagaagaagtaacatataaaattaaggtagccgtccttttaaactaaagaatcaattaaattacacttacaaattgaaaaatagtataaattttgaaaatattaagacagttctattgacagaaagtttaaaagtgatagactttaggtgttaagaaaatatagaaggaaatttgtgatatgggaagaaaagattcacaacgtttttcaatcaggaagtatagctttggagttgcttctgttcttttggggacaaccattcttgcgatgggggcaactggtgtacatgcagatgaggtttcaacttcagctgctactgatacaccacttagtgcttctgtgctaacagatactgctgccaatccggcaacgactgttgattattcagagaagcaagttgtttctgtcaaagaagaaggaaataccactgtaacaacaagtgttgttacaactgatagtcttgaggatgctaaagcttctgcggtaaaagaaggggtagaagtcgaagaaactgcacctcaaacacatacaaccctagagggtgctattgctgacaatcaagctcaatcaaaagagattaatacggttgtttctgattatcagaaagcaaaagaaagccacaaaaaagatgtagctgagtatgataaggctaaggctgagtacgatgctaaagtggccgaaaaagcagcagctgataaagcaaacgctgcttctaaagcacagtatgatactgatcaagctgcttatgaaaaagggttagctaagtaccaagctgataaaaaagcctatgatgcagcattggaagagtataatactcaaaaattaacttatgattctaaagtcgcagaaaaagcagctgccgatgcagctaatgctaagtcagaagctgattataaggtacagttggctgtttatgaaactgctaagaagaactatgaagctgctatggctcagtataccaaagacaaggcaaaatatgatgctgagaaggaagcttatgatgctaaagtagctgaaaaagttcgtacagaaatcgaaaacaaggctgctcaagagcagtatgagaaagaattagctacttataatgccgcttacgaaaaatatcaaaccgatttagctgcctacaagactgccaaagccgcctacgatgttaaagtagccgaaaaagcagcagctgatgcagctaatgcagaagctaaagctaagtatgatgcggaaatggtcacttacgaagcagccttgtctaaatataagacaaataaggcttcatatgatgccgctctagctgaatacaatacgaaaaaagcagcctatgatgctaaagtagctgagaaaacacaagcagaaattactgataaggctgctcaagagcaatatgagaaagatcttactgcttacaatacggcttacgaaaaatatcaaactgatttagctgcctacaagactgctaaagtagcctacgatgccaaagtagccgaaaaagcagcagctgataaggcaaatacggaagctaaagccaagtatgacgcagaaatggctgtttacaatacagctaaagcgcaatacgataaagatttacaagaatatcaagctaagaaagcgcaatacgataaagataaagcagcctatgatcaacttgttgctattaaagcagaagaagatgctgcaaaagctaagtatgaggttgagcttgcaaaatacaatgtagatttagagcaatacggcaaagattttgctacctaccaaacaaaacttgctgaatatcaaacagctttggcacagtacaaagatgctaaagcagcctatgataagtacatgaatgataatggtttccaagatctaaaagatgtagaaactgttcaagatttgaccttccaacgtgaaggtggagccattcataccatcaatggcatcagtgcttatctcactcgagatgctcaagctcgtttgaatactagcaatgtacatcagtatgattccaataaattggaagcttcagatattgtagcaactagtccttgggccaataatgaaactgagtatattcaagttaaggaaggcgataaatttgttgttacttatgataacttgaatcagtcaagtatgcgtgaaaatacggatatgcatccgatcaagcgcgtgatttatcgctatgaaattttgagtcttccatcaaatgacggtaaaggaattgcagccgttagctcggatccaactgtaacactaacagtcggtgcttcaacagaccaaaataaaccagttaaagttgctgtagatgttgaattctatgatggtaatggcaataagtttgatttgacacagcataacgctattgttgcccttaattcccttaaccactggacaggtgcttcttatgtggatagtggagataaacctcgcgcacttacagtagaagctaaagacaaaaatggtaataccgttcgtggaagttggaatccatatgcagatggttcatcaatgagcattgaaaacaatgcagttgttgtaaaaaatggaacagctgactttggtactgctgatgtcactatctctgctgaaaacccaatcaagattgtggcacaaaaagcaacgtgggatggtagtgaatttacagttagtgaagaaactgttattgacgcaacttcagtcaatgtttcaggtgctgggaacggtcactctattggaacagatgagttcacattagatggtaaagatgatgttatcggttcttatacgattgatccaacttcaggacgtatcatctttactcctaagaagaaatttgaaaatgtggagcaccaagagtctgtaaatattggcaataatagatatattccaattccaaattcaagtgtttcttatgatgctgcgactaaagaagtaacctcctttaaagataaccaatacattgaacatggatctatctttaatggtgaatcttcaacgactcttgaaggttgggacaatccatcttctccatacctctattatggtggagcaggattgaagatggctgatggtcacttggtatttacggccaatggagctaatgctgctggtcaaccgacagtatattggtttgcgattaactcaaatgttggtattccaaaaaatccaggtgaagcgccaaaagagccaacagctcctgaagaaccaaaggctccaacaccaccaacgattacattggaagttcttccagcggtaccaacagaaccaactccgccaacagcccctacggcaccaacagaacctaactatacagttgttacagttgattcagagcaacctaaggcaccaacagaaccaaaagcaccaacgccaccaactccgacagttgttgaagttcctgcggaaccaagcaaaccagaagaacctaaagctccaacaccaccgacagaacctaactacactgtggttacagttgatgcagaggaacctaaggctccaacagaaccaaaagcaccaacgccaccaactccagctttagttgaagtgccagtagagccacgtaagattacggctccagtagaacctaaggctccgactccacctacacctgtagttgtagaggtacctggtgagccaacaaaaccaactccaccaacagagccaacagctccaacaccaccaactatggtcacagttaatgttcctaataaacctgtttcacctaaagaacttgtagctcctaaggtaaaatggcataaaaattatcttgttgagcgcgtaacacgtccagtaccaacgacgccaccaactcctcaaaaaccaaaaactcctggaacacctacaggaccaagcgttacaccaacttcttctatagttgctaagcaagaaacagaaagaactaatagcgccgtattgccagaaacaggtgactctaaccaaaaattagcatctgtaacaggtctaggcctgctttcaatggccctttcaggtctatggtcagctcgcaaacgtaaacattaataagataaaatgaaagattaggttgttttgctatgcaagacagtctagtctttttttttgttacttattctttgcatattatcggcataaataactttgaatgttaaaactaataggggaaaggagaggacatgatttaggtgaaagagctatccaaaagctaaatatcacaatgaaaagtaaaatgaaagcatatagttgattgtttttcataatcttttcaataaaaaaacattaaagcgaattggactagatattataaaattaaacctcctttttgtatcgaaaacgctattaattataggattttgtctatcaaataatttgatattaaaaaatatttgaatttaagaatctaatcgaatttaaaggaatgcgtgtttttatgagatatctcaaattgacatggttctttcttttgttagaatatgaacataactaaatatagaaggacgtaatttaaatggggaaaaaggaattacaacgttattcactcagaaagtctagccttggtgcggcttctgttcttttggggactgcagttcttgcagtaggagcttcaaatgcaagcgctgatgaggtagcaacaactacagattcagcaacaccagcagttgaagcaacagatgctgttgaagaaaacacttcagccgtagcagattcaactgaaaagaaagttgttaacgttactgaagaaggcaacacaactgttacaacgagtgaagtaacaaatacaagcttagaagctgcaaaaacagctgcaactaacgaaggggttgaggttaaggaagaacctgctcaaaccaaagaaactgttgaagcagctgctgcagataataaagcacaagcagagaaaatcaatacagtcgtttctgattataaagcggctaaagaacaatacaagtcagataaagctgactatgataaagcaaaagcaaactatgatgccaaattagctgagaaagcacttgctgataaaacaaatgctgaagctcaggctaaatatgatactgaaaaaacagcttatgataaagcttcagagcaataccaaattgctaagcaagcttatgactcagctctttcagagtacaagactaagaaagttacttatgatgctaaggtagcagaaaaagaagccgctgataaagaaaatgcgctttctgcagctaaataccaagcagaattggcaacatataaccaagcaaaagctgattatgaagcagctcttgctcagtacaatagcgataaagccaaatacaacgctgaaaaagctaactatgataataaagtagctgaaaaagttgttactgagaaacgtaacgctgaagctgaagctaaatatcaaactgagctagcagcatacaatgaagcaaaagctaaatatgatgtagaaaaagcagcatatgacaagaatcttgaactttataacgctaagaaaacagcttatgaagcagatcttgaaacaaaacaagctattgaaaaatacaatgcagatgctaaagctaaatacgaagctgccttggttgtctacaatgagcaaaaagctaaatatgaccaagagtaccttgagtatcaaaacaaattagctgtttaccaaacagcacttaaacaataccaagatgctaaaacagcttacgataaatacatgaatgatcctgtatatcgtaaccttaaagatgctgaagttgttcaagaattgactttccaacgtgaaaacgatgcgacacacaaagttgaaggtgtaagcaactacttgacaaaagaagcacaagagcgtcttaacacaagtaatgttttccaatatgattctaacaagttacaagcatctgacattgtctcaaacagtccttggacaaacactgaagacgagtggattcaagttaaagaaggtgacaaatttgttgttacttatgatggcttgaaccaatcaagcatgcttgttgagaatgaagcatcagcaatcaaacgtgttgtttaccgttacgaaatcgttagccttccatcaaacgacggaaaaggtatcgcgaaaatcagtaaggatccaacagtaactatgacagttggagcatcaactgatcaagataaaccagttaaagtagctgtagatgttgagttttacgataaagatggtaaaatgttcaaccttagtgagcgtaatgctatcgtagcacttaactcacttaaccactggaacggtgcagcttatgttgaaacatctgagcgcccacgtccacttacagtagaagcgaaagacgttaatggtaatactgttcgcggtacttacaatccttacgcagatggttctactttggcaatccaaaacggtgaagttgttacaaaatctggttacgcagattttggtggagctacagttaacatttcagatgagaacccacttaaggtagtggttcctatcactgactggaatggttcagaatgggttgtctcacgtgaaattccaactgatgtaacaactcttaatgcttcaggtagtggtaatggccacgctcttggtaaccaagattatacgtttggtgataaagatgatattattggttcatacagtgtttctgctgaaacaggtttgattacattcacacctaagaaaaaataccaatcaacacgccaccaagaatatgtaaatattggtgataaccaattcatcgctattccaaaatcatcagttacttatgatgctgccactaaagaagtaacatcagtcaatgataaccaatacattgatcatggtgcagtctttaatggtgagacaacatcagaattgacaggttgggataacgctgattcaccttacctctactatggaggtgcaggtatcaagatgactaatggtcacttggtatttactgctgaaggtgcaaatgctgaaggtgcaccaacagtttactggttcgcaatcaactctaaccttggtttgcctaagaatccaggtgaaaaacctgaagaacctaaggcaccaacaccaccaacagcaccgattaaaccagtcgttaaaacagttggtatcaatccacaagaaccaacaccaccaacacctccaaaagagccagtggcaccaacgccaccaactccagaggtagttgaagttcctggtaaaccacaagaaccaacaccaccaacaggtccaacggcaccaacgccaccaacaccaaaagtggttgaagttccagaaaaaccggttgaaccaacaccaccaacaggtccaacggcaccaacgccaccaacaccaaaagtagttgaagttcctgctaaaccagtagaacctaaaactcctgaaaaaccaagtgttgtctggcacaagaactatgtcgttgagagagagtctcacgtggtaccaccaactccaccgactactccaccaacacctgttactcctccaactccagtgacaccaccaactacaccaactccagatactgaagttcctgtagtgcctcaagctgagttgccacaaactggtgagcacactagcaatgctggatttattggacttctttcaatgatttttgcagcctttgtaggattcttcaaacgtcgtaaagaagattaagtggtgctattaaattagttccccatcaaaactagattctatttaggatctagtttttatttttgctcgtttttcctccctcatatcatttctatttactggtgaaacatgttataattattttgaacgactattttagaaagatgcaaggagacgagcatggaagaacttaagaaaatcgctggtgtaaccgctgccaaatatgttgaagatggaatggttgttggactcggtacagggtcaacagcctacttctttgtagaggaaattggccgtcgtattaaggaagaaggtcttagtgttgttggtgtaacgacatcaagtcaaaccactaaacaagctgaaggcttaggcattcctttgaaggcagtggatgacattgacagtattgatgttactgttgatggagccgacgaagtagaccctcaactcaacgggattaaaggtggcggtggtgcccttttgatggaaaaaatcgttgctacacctacaaaagaatatatctgggtggttgatgagtctaaaatggttgatcaattaggtgctttcaaactaccagttgaagtggttcaatatggtgctgaccgtctgtatcgtgtctttgagtctaagggctataagccatcattccgacttacggaacaaggtgaccgctttgttacagatatgaagaactatatcatcgatcttgatttaggtaagattgaaaacccagtagctcttggtgaagaactaaaagctatgacaggggttgtcgatcatggattgttcaatggcatggttaacaaagtcatcgttgcaggaaaagacggtgttaaggtcgttgaagttaaggcctagtccgatttttatccctctcacttttaatgaggaaaactaattaattattttcaaactattaaataatatagaaaggcaagaggtaatttcgaaaagattttagctctttgtggtgttgttatgtccaaatttaaccgaatgcatttagtcgttcttgattcagtaggaattggtgctgctccagatgccaatgactttgtcaatgcaggtgtgccagacggtgcttcagatacccttggtcacatctctaaatctgtaggattgaatgtgccaaatatggctaagcttggtctaggaaatattcctcgtgaaacacctttgaaaacagtaccagcagagagcaacccaactggttatgcaacaaaattgcaggaagtttctcttggtaaagatacgatgactggtcactgggaaatcatgggtctcaatattactgaaccttttgatactttctggaacggattcccagaagaaattctcactaaaattgaagaattctcaggacgtaaagtcattcgtgaagctaataaaccatactcaggtacggctgttattgaagactttggacctcgtcaaatggaaactggtgaattgattatttacacttcagctgacccagttcttcaaattgccgcacacgaagacgttattcctttggctgaattgtatcgtatttgtgaatatgcacgttcaattactcttgagcgtccagctcttctagggcgtatcattgctcgtccttacgttggtgaacctggaaacttcactcgtacgtctaaccgtcgtgatttggctgtttcaccatttgcaccaactgttttggataaattgaatgaagctggtatcgatacttatgccgttggtaaaatcaatgatattttcaatggagctggtatcaaccacgatatgggacacaacaaatcaaatagccatggtattgataatttgattaaagctatgacttctgaagacttcaaacatggtttctcattcacaaacttggtagactttgatgccctttatggacatcgtcgtgacccacatggatatcgtgattgcttgcacgaatttgaccaacgtttgcctgaaatcattgctgctatgcgtgaagatgatctcttgatgattactgctgaccatggaaatgatccaacttatgcaggtacggaccatactcgcgaatatattccattcttggcttacagtccatcattcaaaggaaatggacttattccagtaggttatttctctgatatctcagcaacaatcgctgaaaactttggtgtagacaaagccatgattggagaaagtttcttggataaacttgtctaagatgaaacgatatgcattcttggttcgtggggtaaatgttggtggccgtcataaggtagtcatgggagacttctgtcgtgagttagaaaatctcggtatgacaaatgtctcttcctatattaatagtggaaattttttcttcaattcatctttgagaaaagaagagctccttgtgattttggaacgttttttagataagaactatccttttataaaggtattttctctttttactcttgaagattatcagaatgacctagcttctttgccaaagtggtggtctgaggatttctatagaaaagacgttctctttttcactgaaagacttgataaaaatgaaatgaagaagattattaactctttagagttgaaagatgaaatacttcattttggtcaacttggtgtctactgggtaaagtatgataaatcaacttatagacaaacagcttatcataagaagttattgaaaacacctttttatcctgatataaccattcgaaatgcaagaactttttcaaaaattggtcactttttaagaatgaaataaaattaagggagaaataacatgtcgctacttgaaaaaattagagttactcaagcatttttggaaagcaaaggaattgaaaaacctgagtttggtttaattttaggttctggacttggtgagttggctgaagaagtggaagacgcaattgtcattgactatgcggatattccaaactggggacaatcaacggttgtcggtcatgctggaaaacttgtttacggaactttgtctggacgtaaggttttggctcttcaagggcgtttccatttttatgaaggaaatccgcttgaagtcgttactttccctgtacgtgttatgaaagctcttggatgtgaaggagttgttgtaaccaatgcagcaggtggtatcggctttggccctggtactttgatggccatcactgaccacattaacatgactggtcaaaacccattgatcggtgaaaacttggatgattttggtccacgtttccctgatatgtctaaagcttacacacctgaataccgtgaaaccgctcataaagtggctgataaacttggtatcaaattggatgatggtgtttatatcggtgtgactggtccaacttatgaaactccagctgaaatccgtgcttataagacacttggtgcagatgctgttgggatgtctacagttcctgaggttattgttgcagctcactctggtttgaaagttcttggtatctcatgtattactaactttgcggctggtttccaagaagaattgaaccacgaagaagtggtggaagtgacttcgcgtgtcaaaggggatttcaaaggattgctaaaagcgattcttgctgaactctaaaaaggaataattgatgtcaaacttaatgaataatccattatttcgtatcgttcgtggagtttttataattgctttcctgaccatggtttggttggttatattttctgctatagatacaagtggtagtgagatagactatgaaccatttcaaggagcatctatcgtatttgcagttttaagctatatcataatagtgtttctatttcaataccataaagttgttaacttaaaagagtcaattaaatcatcatacagtgcaattgaaattaaagaacagtatgtggaaaaattgattttacaactgcgagaactgactgataagattgtagaccatgagttaaaaatgtctgttagaaaaaatgtttcagaattgttagaggaaaaaaagtctgtcaacaatttgactaacgatgaaaacaaagctaatcattcagaatctaagcggaagtcttacggtgagtctggcaatttttctaaacatgaatactctactaaactagagaaaacgaagaataaaattattgaggaaatcgaaagagatacaaatattaccgctgatcaaagtataaaggatttgattgctgagattaaagagtcagaagtacttgttgctaatcaaaaattatactacaatgaaatggtgtcgcaatataataaaacaatttatagtttgccacttgctttgttaagaacaactttaggtcattcagagataaactacttataacaaagaacaaaatcattaagactagaatatagttaaaaaggtaaaagaatgaatgctagttttagttttcctaattcaacacgagattgccttactatgaaataaaaacaaagaagggattgaccttactctaaagacagtaggaaaagttggttaaagcaattttagtcatactctaatatatgggtaatcaagaaagaaagagtttgacttggctccccaagtcgactaggttaagtttagctgtttttggaaccggtattgcttcaggtttggtaggcattctttgtcattaccttttggagtttatacaaattcttgtatttggtaatgataaatcgaatttattgtcacagtttaactctgtaagtccctttcgacgatttgcagtattgcttgtagtaggtgttttggctagtttattttggtatttccttcagagacgagtgtccctcctttctattagtaaggctaagcaactcgttggtaagaagagtccaaattttcttggccagagtctacacgctttgatgcaggttgcaatcgttggggctggttcctcaattggtaaagaaggagcgcctcgagaattaggcgctctatttggtggtaatctctccaaagccttgcacttggatattgttgatagacagttgctaattgcttgcggggcaggcgctggcttagctgcggtttaccaagtcccctttgccagtacactgtttgttctggaaaccttaggtgttgcttggaaatcaaaaaacattgttatcattcttgtgacaacttacttgtcagcttattgtgctcgaccaatcgttggtaaggaggcaatgtatcaagtcggtaaagttagctcagaccctgctagtctgattcaggttattgttcttgtattagtgataactccgctggcgatgatgtttagcttcttagccaaaaaggctagcaaaagtcgtattactgataaacgcattctgtggaccatgccactatcttatatagtactaggtgggattgcagctttctatcctttaatcatgggaaatggtcaggttctagcacaatggttattttcaggtggggtttcagcatacctacctcttctccttgtcgtcaaaggacttgtggtatgtttgcttttatgggcaggctcttatggaggaaccctaacgccttcctttaccttaggtgccggatcgggtttcctattgacaagctgtcttgagatttttggcttatccctcaatcctactctaggaatgttactcggtgcaaccgtatttttaggaacaactttagatgctcctctaactgggatagccttggttttaggttttactggtcaaggagagctggtagcagtaccactaatcttagcgagtctactatcgaggataattaaaaatagatggaagaaaaaacaatgaatattcattttatcttacacgaaacgttcgaagttccaggagcctatttaaaatgggctcaagaccgtgggcataatatcacatcaaccaaggtatatgaggaagaggttcttcctgaaaccgttgaaggtattgattttctaattgtgatgggtggccctcagtcacctgatgaggatcgtcaggcctttccttattatgacccagaggctgagattgcatttatgcaaaaagcaattgctgctgatatctatattgttggggtttgcctaggtgctcaacttttatctgtagcctatggtggtaagtatgagcatagtccagaacgcgaaattggtgtgtttccaataacacttacggatgatggattagctgatgagcatgtcaaaggttttggcacaactctaaatactggccactggcatggtgatatgcctggattgactgataatgcagttgttcttgctactagtcaaggttgtccacgtcaaattgttcgcttcagtcctaaacactatgcctttcaggcacacttggagtttgatcctgaagccagtgatttacttatagctgctgacggtgaagagcatttacgtaagcaaaataaagacttgccttttgttcaaacacctgaacaattacgtgccaacgattattctgaaatgaacaaaaagttatacaattttcttgattcattgactcaagcttaatccacttttaaagtagttatttatccactatataatagtagaaaaatatttaaaaataaaaattaagaaaggtagagcgtgtgttctgatttgaacacgagcggaaagctcggaaaatagatagtcttcatttgttttctgtctgctcctttaccatcaaaaaatgaaaggaagggtagttcgggtttgaaactgaacccgggctagaggctgtgtaaaaaagataaatcctcctagatgcgaagcatctttgtcggatttcctatttttactttgcctctttaatgcccttggtatattatattatgtctattcatattgctgctaagcaaggagaaattgctgataaaattcttcttccaggggatccattgcgtgcgaaattcattgctgagaatttccttgaggatgctgtatgtttcaatgaggttcgtaacatgtttggttacacaggaacatataaaggtgaacgtgtctcagtaatgggaacaggaatggggatgccatcgatctctatttacgcgcgtgagcttatcgttgactatggtgttaaaaaattgatccgtgtgggaactgctggttcattgaacgaggatgttcacgttcgtgagttagttctagcacaagccgcagcgacaaactctaacattatccgtaatgattggccacaatacgatttcccacaaattgcaagtttcgatctcttggataaggcttaccacattgccaaagatctcggtatgacaacacatgttggtaatgttttgtcttctgatgttttctattcaaattatttcgaaaaaaacattgagcttggtaaatggggagtgaaggctgttgaaatggaagcagcagcactttattaccttgcagctcaacaccaagtagatgctcttgccatcatgactatttctgatagtttggtcaatccagatgaagacactacagctgaggaacgtcaaaacactttcactgacatgatgaaagttggtcttgaaacactaattgcagactaatctgtaaaaggacgccattaggtcgtccttttgtgttgtaactaagatctactcgaagaatcaataggttaaaaattttcaaactactagaaaaaaataaaaatatttggaagaaaaagacttgtaataaatagataaatatccgacaatttaagattcaaccaccaaaaatgtgaaaaatagtttacaatattatgaaaaatgatagaaattaaatgcttgatatcataatgaaaaacggtttcttcttttttaaaaagaatgacaattgaaatgaagttatagtaatgttataatgataatgggaaatgtctaattttaatttttaggagcaatttatatgagttcgcgtacgaatcgtaagcaaaaacgtacgagtaatagatcgtgggggatggtcaacgttgggttgaccattctgtatgctattttagcattgatcttattattcacaatgttcaattataatttcctatcatttaggtttttgaacatcattatcaccattggtttgttggtagttcttgctattagcatcttccttcagaagactaagaaatcaccactagtgacaacggttgtattggttatcttctcgctagtttctctggttggtatttttggttttaaacaaatgattgatatcactaaccgtatgaatcagacggctgcattttctgaagtagaaatgagcatagtggttcctaaggatagtgacatcaaagatgtgagtcagcttactagcgtacaagcaccaactaaggttgataagaacaatatcgacaccttgatgtctgctctaaagaaagacaaaaaggttgatcttaaagttgatgatgttgcttcatatcaagaagcatatgacaatcttaagtctggcaaatctaaagctatggtcttgagtggctcttatgctagcctactagagtctgtcgatagtaactatgcttcaaatctaaaaacaatctatacttataaaattaaaaagaagaataacaattctgcaaaacaagtagattcaaaagtcttcaatatttatattagtggtattgatacctacggttcaatttcaacagtgtcacgttcagatgtcaatatcattatgaccgttaacatgaacacacataagatcctcttgacgaccactccacgtgatgcgtacgttaagattcctgatggaggggcagaccagtatgataaattaacccacgcaggtatttatggcgttgaaacatctgaaaaaactctggaaaatctttatggcattaagattgattactatgcacgtattaacttcacatctttccttaagttgattgaccaacttggtggtgtgacagttcataatgatcaagccttcacgagtcttcacgggaagtttgatttcccagttggagatatccaaatgaattctgaacaagcccttggctttgttcgtgagcgttatagtttggatggaggagacaatgaccgtggtaagaaccaagagaaagtgatttctgcgattgtaaacaagttagcttcactaaattctgtatcaaactttacttcaatcgttaacaatcttcaagactctgttcaaacgaatatgtctctagataccattaatgctctggccaatacacaacttgattcaggttctaaatttacggtgacttctcaagcagtaacaggtacaggttcaaccggacaattgacctcttatgctatgccaaattctagtctctacatgatgaaactggatgattctagtgtggaaagcgcctctcaagctatcaaaaatttgatggaggaaaaataagtgattgacgttcactcacatattgtttttgatgttgatgatggtcctaaaactttagaagaaagtcttgacctcattagcgaaagctatgcgcaaggagtgcgtacgattgtttcaacatcccatcgtcgtaagggaatgtttgaaaccccagaggataaaatctttgcaaacttttctaaggtaaaagaagaagcagaagcactttatccagacttaactatttattatggtggtgaactttattacacctcagacattgtggagaagcttgaaaagaatctcattccacgcatgcacaacactcaatttgcattgattgagtttagtgctcgcacatcttggaaagaaattcatagtggtcttagtaatgttttgcgagcaggggtgacaccaattgttgctcatattgagcgctatgatgccctcgaagaaaatgctgaccgtgttcgagaaatcatcaatatgggctgctatactcaagtcaatagctcacatgtcctcaaaccaaagctctttggcgataaagataaagtaagaaagaaacgtgtccgttatttcttggaaaaaaatttggttcatatggttgctagtgacatgcataatcttggtccaagaccaccatttatgaaagatgcctacgctattattgaaaagacttacggaacgagacgtgctcgtaaccttttcattgaaaatccacaaacactacttgaaaatcaatacatataggagaaactatgactcaggaaaacacgaagcgtgttgaaatcgacgtgcttgcattattgcacaaactttggactaaaaaggtatttattctatttacagccttttatgtcgctgtctttgccttcttgggaacttatttcctcattcaaccaacgtatacgtcttctacacgtatctatgttgttaaccaagctaatgatggcaaaaacctttctgctcaagatttgcaggccggtacatttttgacaaaagactacaaagaaattattacatcaaacgatgtcttgtcagaagttatcaaagatgaaaaattgaatatgacagaagctgaacttgctaaaatgatttcagttaatattcctactgatactcgtctaatctcaatttctgttaatgctaaaactggtcaagatgcgcaaacacttgccaataaggttcgtgaagttgcttcagaaaaaatcaagaacgtgacaaaagttgaagatgtcacaacacttgaagaagctaaattgccagagtcaccatcttcaccaaatatcaaacgtaacgtgcttcttggagcattgcttggaggattccttgcagttgttggtgtattggtacgtgagatcctagatgatcgtattcgccgtccagaagatgtggaagatgcccttggaatgacacttcttggaattgtccctgatacagataaaatttaaggagaagaaatgcctctattaaagttagtaaaatctaaagtaaactttgccaaacaaacagaagagtattacaatgccattcgcacaaatattcaattttctggtgcacagatgaaagtgattgcgattagctctgttgaagctggtgaaggaaaatcaacgacatctgtaaacttggcgatttcatttgctagtgttgggcttcgaacacttctcattgatgctgatactcgtaattctgttttgtcaggtacatttaagtcaaatgagccttataaaggtctttcaaatttcctttcaggaaatgcagatttgaatgaaacgatttgccaaactgatatttctggtttggatgtcattgcatctggtcctgtaccacctaatccaacaagtcttttgcaaaatgacaattttagacatttgatggaagttgctcgtagtcgttatgattatgtcattatcgatacaccaccaattggtttggttattgatgccgttattattgcccatcaggctgatgccagtcttttggttacagcagctgggaaaatcaaacgtcgtttcgtaactaaggccgttgaacaactgggacaaagtggttctcaattcttaggtgtcgtccttaataaagttgacatgacagttgataagtatggatcatatggttcttacggatcatatggcgagtacgggaaaaaatcagaccaaaaagaaggtcattcaagagcacatcgtcgtagaaaaggatagcattaatggggatgatgcggctccttataccttaacagattaaaaaggggtttagagtgaaagaaaaacaagaaattcgtcgcattgaaattggtattatacagttggtagtggttgttttcgcagccatggtagctagtaaaataccttatacagagattacccaaggaagcattgtccttttaggtgtcgtacatgtagtgtcttactatatcagtagttattatgaaaatcttaagtatagaggctacttggatgaactcattgcaactgtcaaatattgtttcatatttgctctaattgcaactttcctctcgttttttgcagatggaagtttttctatctcacgtcgcggacttctctatgttaccctgatttcaggtgttctcttatacgttacaaatactgttctaaagtatttccgttcatcaatttatacacgtcgtaaaagtaacaagaatattctcttgatttctgatcaggcacgtctagaaaatgttttgtcacgaatgaaagacaatatggatggtaggattacagccgtttgtgtcttggataatccttatttcactgatccatttatcaagagtgtcaaacctgaaaatttaatcgaatatgcgacacactcagtagtagaccaagttttgattaatctgccaagtgagcagtataagatttgggattatgcatcaccttttgagctcatgggaattccagtatccattaatttgaatgctcttgaatttatgagtcagggtgaaaaacgcatccaacaattgggtcctttcaaagttgttaccttttcaacgcatttttatagctatggagatatcttggcgaaacgtttcctcgatatctgtggagctctagtaggtttggtgctctgtgggattgttggaatcttcctttatccacttattcgtaaagatggtggaccagctatctttgctcaagaccgtgtgggtgagaatggacgtatcttcaagttttataaattccgttctatgagagtagatgctgaagaaatcaagaagaatttgatggcacagaatcaaatgtctggtggtatgtttaagatggacaatgatccacgtattaccaaaatcggccatttcattcgtaaaacgagtcttgatgaacttccacaattttggaatgttctaaaaggtgatatgagcttggtaggaacacgtccaccaacattggatgagtacgaatcttatacacctgaacaaaaacgtcgcctcagctttaaaccaggtattactggtctttggcaagtaagcggtcgaagtgaaattacggattttgatgaagttgtaaaactagatgttgcttatatggacggatggacaatctggcgcgatatcaaaatcttattgaaaacaattaaagtagtagtaatgaaggatggagcaaagtgatggctttctccatttcttttaatggtgattaaatgacaaaaacagtttatatcgttggttctaagggaattccagcaaaatatggtggatttgagacctttgttgagaagttaacggagttccaacaagacaaagatatccaatattatgtagcttgtatgcgtgaaaactctgctaaatcaggtattacagcagacacttttgaacataacggtgctaaatgctacaatatcgacgtcccaaatatcgggcctgcacgtgccatcgcttatgacattgcagctcttaataaggccattgaaattgctaaggaaaacaatgaccaagcaccaatcttttatgttttggcctgccgaatcggtccatttatctcaggtattaaaaagaaaatcaaggctatcggtggtacccttatggttaacccggacggtcatgaatggcttcgtgcgaaatggagtcttccagttcgtaaatattggaaaatttctgagcaactcatggtaaaacatgcagatcttttgatttgtgatagtaaaaacattgaatcttatattcaaaaggattatgcgaagtatcgtcctcaaacaacttatattgcctatgggacagatacaactaaatctcgattgactaaggttgatgataaggttcgcacatggtattttgaaaagggggtcattgaaaataattattaccttgttgtaggacgttttgtgcctgaaaataactatgaggctatgattcgtggctttatggcatctaactctgacaaggactttgtactcattaccaatgttgaagaaaacaaattctacgacaagttgcgtcaggaaactggttttgacaaggatcctcgagtgaagtttgtcggaactgtctatgaccaagaattgctcaaatacattcgtgagaatgcctttgcttacttccatggtcatgaagtaggtggtaccaatccatcccttcttgaggctcttgagtctactaagctcaatctcttattggatgttggctttaaccgtgaagtcggtgaagatggtgctctctattggaagaaagaccaattggcaagtgtcatcgatcaagctgagcaattggatgaacaagctatcgaagatctcaatcaaaaatcaagtaaacgtattgctgaagcctttacttgggaaaaaattgttacagactacgagaaagtatttaaaggatagaaatgcagaaaattttatatcttcacgctggtgccgaaatgtatggtgctgacaaggttttattggagcttattaaagggttggataaagatgcctttgaagctcatgtcatcttgcccaacgatggtgtcttagtgagtgcattggaaaaggttggggctaaggtaaaagttatcgattatccaatcttgcgccgtaaatattttaatcctaagggaattcttgagtattttggctcttataatcgttattcaaagcaaattgctaaatatgctaaggataatggcattactcttattcacaataatacgactgcggtacttgaggggatttatctcaaacgtaagttgaaattacctttgatttggcatgtgcatgaaattatcgttaaaccaaaagcaatctctgattttatcaactttttgatggggcgttatgcggatacgattgtgacagtttcaaatgctgtggctaaccacgtcaagcagtctcgctttgtaaaaaatgaccaagttcaagttatctataacggtgttgacaatgccgtctatcatgaaatggatgctagtgcagtccgtgatcagtttggtatcgcacaggatgctttggttatcggaatggttggtcgagtgaatgcatggaaaggtcaaggcgacttcttagaagctgtgactccaatcttaaaggctaatccaaaagcagtagcctttctggcagggagtgcttttgaaggtgaagaatggcgagttgatgagctggagaaggctatatcagactcacctgtagctgggcagattaaacgtatcgattattatagcaagacgacagagctctataatatgtttgatatctttgtcttgccaagtaccaatccagatcctctaccaactgtagttctcgaatcaatggcttgtggcaaacccgtagtcggctaccgtcatggtggtgtctgtgaaatggttaaggaaggtaaaaatggccttcttgccacaccaaatcagcctgcagaattgtctaaggctattcaagaattggctgataacaccgagaagagagagcaatttggcaaggcatctgtcaaacgccaaaaagaactcttttcattacaaagttatattcgtaatttctcggagttatataagaagtactaagaagtactattatgaacagcgaaacactaaaaaataaattaaaacgtatcgtttatccaattattaattttattcctagacgaagactcaagaataaaaatttcacgattatttgtgataattgttgggctgggaaagtttatcaggagttgggcttgccttaccaaacaccatttgtagggatgtttgtcttttcgcctgattacatcaagatgctcaagaatttaaaacactatttgagcggagacatccccttgaaatttgttaaggaatcaaaatatatcaaagactttgataatgcttatcctcttgcacttcttgatgatattgaacttcattttttgcattatgcagatgaagaagaagctactcaaaaatgggaacgccgtttgaagagaatgcattgggataatttgtatttcaagttcaatgataatgatgcctgcacgtatgagttgatgaaagagtttgaagagcttccatacaagagtaaggtcattttctcttcaaagaattatagtgacttaccttcattggtccactttaaatcggctgagaagcaagggcatgttggtatcgatttaaaaacttaccaccgttattttaataccgttacttggttgaataagggtggggaagacttaacataaaaaattaggtaaataatctatgaaaccacttttaactgtcgtcattccagtttataatgtcgaaaaatatttaaaacgttgtattgagagtatccttattcaagagtggaagaactatgacatcttacttgtaaatgatggaagtactgataattctcctcaaatttgtgatgactatgctaaagcgtatgactttatctcagttatacataagaagaatggtggactatctgcagctcgtaacactggtatctctcatgctgagggagaatatgtctatttccctgattcagatgattggattgaaccagacacctttatggcgttagcagaagtggtggaatcccagaagtttgatattatctcttttaatcgtgagttcgtgaaaggtgaagaagatgctatagtttcggattcattagtgactcaagtttttgagggtaaagatgcttttgtgcagatgcttaagcatagttatattactggtttcgctaatgataaaatctatagaaagtctttatttactgataatgatattcagtttcctattggtaaatactatgaggatcttggcactaattacaaactctttctatcagctaaaaaggtctatgcaaccaatcaaaagtattatcactacctaatcgataatcctgattctattactcagtcatggaatgaaaagaaatttagtgatatgtttggattctacaaagaacttttctattctgactttgtccgttcacaattaaataaagaagagttgcaaatatctcaactttattatgtaaacggattggttcatatactagcaagtttgtataaatctaaattagataaaaaatatatagacattactaacgaagtgaaacaagaattacttaagaatagtgtttctctttctcaaatgaaagac

SEQ ID NO: 15 - DNA, 164439 bp, Streptococcus salivarius
  source 1..164439: mol_type = genomic DNA
ttcctccgattgagatcccgtttgaatcttcactttattatgaagttgaggaaatcaatcctgggttatcgaagttaataattaccacagagcatgcagaagcttttcaagaggctgatatacacatgttggaaactcgcttaactatgttacagcgagcaaaagaatgtggaaattttacgacaagtaattttccgagtcgttttccaaaggtagcaagagacgatttaagtcagttagatcttctagcttggggaacaaaagatatgccaacatatcttttctgtctgatggaatcagcattagacagttacaggggattttattctttgagagacctaatggaggatgctaacgttacccttcagcaaggttatgagaaagctgtttactggttctatagtggagttaaaggtcaatatgaatattgaaggagaaaaacaatgactaaacatcgttatgttgcgaaatttaaacgtaaagacgaaacagtctttacgaaaaggtttctagcttcagatttgtttcaagctgatgagtatgcactgcagtatgccactaagcgaggtattctctatctcgacttagggcctgcagaagaatagagaattaagctacgtattttatacgtggctttttctttttaaggagaaaaccatatgcgttataatttaaaaagtgacagagatttggcttttgaacaggctcttctgagatacaatatccaaaaaaagagctacttaagatttcgaaagaacaactgtcatcgacacaagagacaactctagaagagttagatgaaatgtccgaacttgttgagcaacttacaaaaggggaagcagtagcagatttggttgcctatgctttcctagatgatatagcattacattgggaatctttacaaaactaagctaatgcttactgatagtagaaaacagtagtgtaaaataagttgtgtaaacacaaaattattgatagtatccgatgattttaagatatagagtagttagaaatgaattaaggatggtggtttaaagtggaaaaagaaacgattatatttcagcgtaatgagtttgataattattatagaagtgtattgaatggtggtaaatatgttgatcctgattgtagagaggacattgatacaccctactataattttttaacggaatttctaagaaaaagagagagtgaaagtaattataaaaataaatattcttttattccccctaaacttgctaaactaactagtgacagtgagaaaaagataaaagataatgataaatataaaattgttgtgaagcaaaatgacgaattgctgttcagacttacttcagatcaatttggtttttcgggaggtgaatatgtatatcagcaatccgatggtcatctcaagtatcctttagctagaattaattatttatctaataatgaatctattgatgagagaaagaggattttaaataaactaattaattatgtgaaaaatacaagaacgcttggtggatcttttatctggcctacgcctaagaaaagtgaaggttttcgaaatagcaaatataatatgagtcgtggtgtaggttcttatatagaagatcgagtagatttaactcttttagagattaaacatgcactagatggggaatatcataaatctcaacataaagatgatatcctatatactctttatattaaaaacacagatggtatacgaacatggttggaccattttgagacatttgagaaatttgttgattattttatgtttaataattttattgaaaatggaatgccaattaacatattgacaggtaaggctatttgtgaagaagaagtaaaaaaatataaaaataaaacatgtcagatcaagaatctcaaattaagtgaactgttagagatgattgagagattagaaaacatgataattaatagaacatgtctgatggaagaacatataaaggattatatagtaaagagatataatatggattgagctccctttatctataacagaaattggtagtgtcaattaagttgtgtaaagacaaaataattgacagtatcttgttggttgaaaagtcgttacaaatgtggtaaaattgctacagaactgataataatgtattcatggggatatatcaccatgataatggaacgtcgtggaatatcaacatgacgttttaacgtaagggggaaaactcttacgttttttgttttgaaagtctgttatagttaaatagacaaaatgtctttaataaagagtgcccctaacccaagattaatgtgatgatatttatgtgttaaaaaattaagctaggaagttaagaatatggaaatcaaaaatcactttggtgtatatggtatttgttttgagaatgggaaattgctatgcattgagaaaacgagaggaccttatcagcatcgttttgatttaccgggtggtagtcaagaactaggtgagggactgacagaaaccctcgaaagagaggttctggaagagacgggctatacgcttagccgttattcaaatcctaggatttatgatgtaatggttcaagaaggtgggcaagacttcgcagtacatcacatcatggccttttatgatatcgtactcgattttgagcgctctcaaaaatcccttcctcaagaggttcttgacggaagcaatgattcagcaaatgcaatttggattcctttcgagcagattaccgaagagaatgcctcacccttagtattgaaggtgaaggcagagttagtaggaattccagaattacaaatgacaagctatagaaattggaaggtaaaagaaggagaacaaatgaaacctcaagaaatgtggaatgcctacaagcaaattaacccctcgatcggagatgaaatcgatgcttgggcttttggagtagaagccgatctcttgtcagatttggtgttaaaaggtgaaaagacggcaactgcatcagcctatgatctttatgcagttgataacgaccccctgccacaagaagggacctttgatgttattttagacagtcaagatcaggctgtctgcattgtcgaagtcacaaaggtttctgttcagcctttccatcaagtgtcagccgaccatgcctacaaggaaggtgagggtgataaatctctggcctattggcgtcaggttcatgaggaggttttcaccgagtggatgagcgatgccggactgacttttacacctgacagcaaggttgttttggaagaatttcgcaaggtttatccattatagaacaccctctccttcttggagagttttttgatatggatcttattttccaaaagggttaaaaaatgatgtaatgtaagcgatattatacagaagtacaggaacagtacgaccgcaaggctaaacaaaaaggtcggaagtcttgtttgaagttgatgaacacgcctgagagtatgatactaagcgagatattctctatctcgtcttaggacctgaagttcagtagaaagttaagatacgtatttaatacgtggcttttttaaaaggggatataccagatgcgttttaattctaaaagtgacagagatttggcttttgaacatgctcttttgaggtaccatatcataaaaaagagctacttaagttttcgaaataacagctgtcatcggcacaagagacaactctagaagagttggatgatatagcattacattgggaatttatccaaacctaagcggatgtttactgatagtagaaaacaaataggcacttaaagtttttgaactttaagtgctttttttgttgctttttgatatcttttacgaatagatatattgtaaaaaataggaggtatatgaaatgatgacttatgatgaagtaatggaagcgatagaaagaggttttatcaagggcgataaaatcagtattgtccgacgaaatggtaaaatccatgattatgtcttgccgggagagaaattagaaccgggagaaatagtgacggaagagaatttagaagctgtccttgaagaattgagtgaataatatatgagaatgttttatttcgaaaatagattgtttaatatttagtatagtatgctgtattaattggtaaaacctaaagagagaatggaattatttgggcgctgtattctctttaggttttacctttttgctataatttttatataaaaaataggaggtgttggtgaatgaagttaaatctagtagtatgttaaaaaagaatgaaaatagaacatgatatgacctttattgattatttaaaatcatactaacatcactattaagtttttagaaggaacagaggaagatttataaggccatagttaagagtgtaagtgctctatctacggcggtttatattttgtgtacaattgtgcttaaataggcagaagtgttataataaagaaaatgttttagtgaattgaggttataaggatttttatacttagtcagcatgtaatgtattctttaaagagattaagtaatgagacaatgcttaggtagaaagaagattattacgccaatactagaatgttttgtttgagcaatggctcaaaggggtaaacaggagctggaatcactgtattttgatagatttaaggagtgatattatggggtggactagtattccgaattttggagataaatatgccaaagttagagaaagaacccattcatctggtgcaaaactgatagaagttttatacggtgctcgtgacaacaggggaagacccacatctccagaaagcaattctgatggacacggtcattggcttgccatagaaatagatggaatatatcagatgttatcatggagacatcctattcatgaaggtggtcagcaagaatatggtcgtggccgaagaagcaatgccctctctgatttggaatctgacataatagaaaaagaaaagatttgttcacaggctaagagtttatcattgtcaaatgattggaaaaccgctgcacctaaatttaagcagttatttaatgaatggaaaaaggtttacaattggggaacgccaaaagaaaaacaactatgggaagattttcaggccgctaaaaaaacgttctatgaacgacgagagagtaatcgttcaaaaaataaagttaccaagcaaagtataatttcggaagctcgaactttatcagcatcaaccgattggaaatccacagggcaacagtttaaaaaactttttgatagatggaaaggcataggttctgctggaaaagatgatgaaattctatggattgagtttaaatctgctcaacaaacattttatgatcgtcgttcaaaatacttcagtgatttagataaacaacgtgacaaaaacagacaaatgaaacaagcactgatttcagaagcaaggagcgtttctcagttttcaacagattggaaacgaactggcgataaactccatgaattaatggataggtggaaagagattggaagtgttggcaaggaatataatgatagtctttggaatgaatttaatagtattcgacaggatttcttcaatcgtagacgtatttattatgaggaacaagacagacttttccaagaaaatgctagccgaaaaggacagattgtacaagaggctgcaaatattgccagcagcagtgactattctgtgcagactacagagcgcatgaaagaacttgatcgtgaatggagaaacataggctccgctggaaagataaatgagcaccagctttggaatctatttcaaagtgctaaagatagcttttggtccggaaaacgcttgtataatgagcgaaaacaacaggaatggcgaagaaaattgtatgaagctatcaatcgtaagagagatcagatttcaaatcttgaacggcaaatcagtgaacttcaatataaaatgagtaacatgagaaatcaagagcatatcaataatatgtaccggtggatagatgaaaaaaattccaagattagagaacttgaaatagcaattcaagacatggaaagcaaattatagattgtgtttccaatataattgatgattaccacgtccttgacctgttcgcgattttaacacatccagaatttttcattcaacgagaagttacaaatagtcactttgatgacggtgttttaggtattttcgagtaatttttggaacgttatccattagctacggaatgttttaataagatttctgattatgttcaaaaaactattaatgatacgataggaaagtttaggattgttaaaaccccatggcataatataactgtatattgtcgacacgtattgagtgtatgagtttactagaaaagatgaaaccgcaagcttaaaatagaatctgagatgatcaatcaatttttcatcggaggccacgaggaatgccaacaaagagatatggtttctgaggaacaattgaacttagtaggtttagttctagcactcttagtattaactgggttgttaagacagaactctgactttatgattgttgtcgacttatgcttgtcgcaaactcttattgagatgtctcgcaataaagcagaaaaattatttggtaggcattaatagtagtatagacaccattttaggatggtgttttttgtttagattgttttttataaagcaatttgctttccacttaatctggttggcagcatttacgaaacctggttgaaaaatataaaaaagtgaaataaagtgtcctctgagcttcgcatacaagacctgttatgatatacttatatcaaggttaaggaatgaggtttctcccctcgacttaacccgaccattgttgttgtaaggttagacgagatttctcctctcgcatctaacataatctattaagttctattagttatgaatcagggacctcccccaaagcataactatcctttctgtttttagtgttatgaggtttctcccctcgctgttcaactaaaaatagtcattgtttttcttctccagagaaatttctcttgggaagagaggtagtccattgagggctgcctctttttttgttgtcaacgaaacttattttgaatagaaaaaaccatcggaacaacagggggtcccaatggttacaacaacaatattttcaaaaaacaatgacgtttcaagaaaaagaagatatggagaagaaggagaaaagcaacctctccataaaattccccgaagggaaaaacaatgactgtgtttaggaatactcctaaacacagttttagtatagcttattaaaggggtgatttcaatgctaggaaaccagattaagctcaaaagtcaacctatgtcactaggttgcgatacctatatgatatagcctatcatggcttcatggtagaatttaaagattatgaaaatacacaagggctcgaagagctagaaggttggcggtattttccgattagagcagcaaataggatcaagtccttctgggagagcaacagcgttctctcttacttgaggcgacatcggttaaaacgaacgatgatcattagttatgcattactgggaacaatggtatggacagctacatctgcttatttctctccaacccgagttacttacttagagtcacaactgcaggcaacacaatcatttggtaatggacttggaagtatcaccgcaacctctatgacttactcttcgtcaaatggcttagtcgttatggaattgacaacatcagatgctactagtgctatcaaaaaagggattaatactgaaaatcttgattggcaggttttcttgccaagtagtgttaagaatcctgaagcagtgaccttagaagtcattccgttaaccggagataaggtgtatctagtcatgcgtaatgtgccttcagattatacgctcatggttattcgtgcgacaaataagacaccgaactcaaacagtctcaagattgacgttcaagaatacaatgactacttatcatcaagttctaatgacgcttcggtttctaagcagaataaacaaaaagataaggaagggaataagaactacgttgatttctttgtaactcctcaaaatgaactcttcaaaaacaaatatgtcaagaatttatctcgtgagaagtttgccctcaatatttttgaagaggagttgaaatatcaaaaaggtcaacgaaaagaactcttggcttctgcaaaaacacttgatgacagtattaaggaagatactaagacattggagcagttgaaacgtgagtcagaatacttggtcggtaacgagttaaccggtaagcagagtgatatggaagctatcgagaaaagtatggactctaaagagaaagacggagcgaaagcgcgtgaaaatgctgcttatgttcagacaatcattgaacagattgaaaagaatatcaaagcagttaagaatggtacctacaagtttaattcaccagtacgatcagtaaaacaagatattgggaaataaatataaaaaggaaagaaaggactttattaacgattatgacaattgacgaacaacgctatttacttaaccaggactgcctattgatgaaatatcaacgaggtaacgctatgaatgaaccccttcaaatttttagagggaaatgggcagacggtttagaacgcctacatcaaatcattgataaagaagttggttggaagaactttcgtagttttgtctcaagtaacgtacatcatgactctgaaacatccattgaggtagttaagacacacttaaaccaatgccgtattgaatgtacggaccttttggatattgattttggagagaaaggttctatttgtattcagagggatcaagtggagcttttgactgagaaattccgttatttcctttattttgaaagtaatattcaaccaatgatggatattgacttctaggaggtactggatgaatcaagaagaaaatcaacaacaagaggggaactggggactgcctcgtggtctttacacgcaggtaaagtactacggtgttccggtaatgaaagccttcattatagtagggagttttgtttttccactacaattcagggatatatttttccctagagggcaagagttgaagttcctaatcaatttactctgtacaatgactttaacgatttattggatgatcccttcttcgtctggtggaaataagttctgggaatttattcatgcacaccgtcggacaaagaaacgttattatccaattgataagaactgttacccagagttgagagatgatggctcgaaaaaccgtcgctacttaatggataaggctgcagaacgtttaggaaggaagtataaatagatgaaggagaggactaaccataatcttagtaagactccttatattgacaaatacacaacagaccttactgagaaaatcagacccaagcgtcaagattttgtggcttggggtagacaagatgaaatcagacaagtctttatctcactgaatcgattagaaaaaaactctcctgtactaattggtgaagctggtgtaggtaaaacagctattgtagaaggaatttgtgcggatattcttaacaagaaagcccacgtcccaacacgtttccaaggtaagcaggttaagcaactagaattatctgctatccaagggaaagaatttgaccatacaggtaaagaggtgaacatcattgccaaaatggacggattgattaaagagtttatggctcacaaagatgagtttatcctctttattgatgaagtgcataccattatgggaacaggtgttgagggaagtgctcttgacgtcgctaatagcttgaaaccagccttatctcgtggggaaatctatcttatttcagccactacagctgatgagtttatgattatcgaacgagacccagcgatggaacgacgtctgcaaccagtttacgttgatgaactggacaaagaggcatctattttggtcttgaaaaaacgtcgtcccaagtataaacgagaacttgatattgagattcctactgatgccattaaggcagcagtagaattatctattcgttatgtcacggataaaatgcttccggataaagctattgatattattgatgaagcttcagcgactgcaaatatcgatgggaaatcagagattaccttaaaagatattgcgagtgtcattcaccgtaaaaaaggtattcctatggaaagtcttctacgcacgtcctcaacaccagtggattttgcagaaggtatgcgtgctgttgttaaggggcaagaccatgtgattcgaactatagcacgccttatgtataaaggtatccagggtgggcagaacaagcgaagacctctaggaactcttcttctacttggaacaacaggtacaggtaaaactgaattggcgaaacaagcagcaaaacaactgtttggtagtgaagaagcgatgattcggctggatatgtcagaatacatgactgataatgctgttgttcgtcttataggaaatgacgagcgaaaaggtgacttaacggagaaaattaagaagaatccctactcgttagtactattggacgagttagaaaaggctcatccagatgtatgggctttatatttgcaaatgcctgatgacgggcatttgactgatggacgtggacgaaaaatcaattttaagaatacgtttatcattgcgacatcaaacgtggggcataagcgaatcagagataaatatatcacctctggtcaaacctttacagaaatgaacaagactgactataaagagttcatgaaggatatgagagacgagttaatcaaaatctttaagcgtcctgaatttatcaaccgttggaaaattgaagtgactaatatcttgacgaaacaaaccattgataagattgtctattcaaaaatggcagtacatgagagtacttggtttaaagagcatcatatccttattaattatgaggatgttaaggatggtgaccaaattatcgatggcaaaaaatacttctatgaatatctcagtagtgtcggtgttagtccagaagatggagcaaggcctttagagagaactattgatgaagtgttaactgatgaaatctttgagcaattgtatttccttgggcgaaagccagaagattactttatggttgatgtgtctttatctggacatgcaccaggaacgtttgcgtatgggaactcaggtagaaagacagttcaagatagacgtcagacacatattactgtcaaacggatacctccagaggagtatggtaactatttgcttacttcttaaggggtgtcactaggttgtgactcgtagatggaatattgtagactacagacattaaaatttaaggaggctgttttgaaagaaaacacatttttgaacaacgtgaagactaaggcatcaacacttggaatgactgctttgttgacgttaaactctgtatcacttgcttttgcggagcaaactggaggaaaagctgctaacccagctaatgaggcaacaaatacgcttaatgatgtttcaggtatgttgcgacttgtattcccggggatagcaataatatctggtttagttgcatgtatcttgatgatgatgggtgaaaagaaacgaacggaagcccttgaccgactcttgtggattgcaatcgcactaagtgttggttcggcgcttgttttggttgttaattatctttggcaacccaaataagtctttaagaggtatactttatggaaaaagaattacttaccataaaggggaatcgcaaggtattgtttcccgatgccttgtttctttatatcgagtggaaaggaaatgcaaatcctaaaaagaatgaagagttagcggatatcattgatgacttagatactgaatatttccctagtaataaaaaagaaagtatcgctcaaagtctaccatttctaacttttaaacaagcagaattactttttcgagaaattaaaaagcgttattctgaatttaccttaaaaggaattgcccttgctagtcaaccgatggaacaaaatggtcgtgtgacacgaccaactacgggagtccctagtattgaaggacaacctcagattaccccttttgttattacgaaagattataaggaactcgttaccccactcatcgaagaagcacaccgtgataaacggtttgagaaaacaacatatgaaggtatctccaactttttcagtgggcctatggggttacttccatgttatgctgaaagtcttggattgtctctagttgatatgccaccctatccaaaacctggaacgattgaaggagaacttccaaatcgtcttatgtcgaataaggataagcataaacagtcagttgctggagccaagaaacggaaggagaagacaggcagagtgtatgaagatgaagaagtaggaccaccaagtaagttgtcattgattttggctattgggtcttgtaccttgtcggtgttcttattgttgatgctaatggtctataatagtaatttcacgcgcgtgaagaaagaacttgtggccacaacagataaagttgagcgtcttacaatgatacaagatcatgaacatgagattgatgtcatggctcgttatttcttgtcatactattattcaggagataaggataagcttaaggcttacttggataataacgacgctaaatttactaacccagaggtagcgactgtttctagcacaatgttggagaaagttgaactcgttaagaatgagaaagatacctatgaggttacatacgttgttggtacaacggatgaggctcaaaaaacgacagttcgtcgtgttactttcaatgttaagaaaaaaccatcagctactcaaggttgggtagttacatctgaaccgacaacaacagcatttgcaattccaacatctccttctactgaaacttcagctgaaaacactgaaaacaaggagggataacctatgggtgcagaagcaacaattgagattgaacaagggaaggtctggccatccctatcagatatgatctctcaatcgaaagattggcctaatgaagttggttctaaaggttggggaggtgacaaagataaagagctattattggcatccttttatgcacagtgggaccaatacctccatccaacaactggggtatttatagcctttggctttattcctgagatgctttcaaagggtatctatagttttagttatgcgattgagaaggtttatctcaacatgtttaagttatttgggatgtttgattatattagtcagtcggatagctttgttggtcaggtttataagtggcttcaaatcgttgggatttctttatttgttttggtaacgctcattcgtcttataatggctatggcaggagcacctttcaggtacagagaattcttcaatcacattattttggtaactttttctgtaactgcacttccggtgttcgcttcaaaatttggtagtgctatagcgaaggataccgtaggactagcctattatgacataactggcagtggtcagagtgtttcactttctgtaaccccatttcggggtaatacggttgacctcgaaatgctgtatgcaatggattttgatacagataagttaggctataatgaagatactcattttatagcgggggataaaaactggaataccatttcagatggtaatatttggttcaccaattttactgaaacttatggcccaaccaacaaagccatgttgcagtattattctggacgtgaaggacgagtatcctcaataactaagttcgtaggagtgcgagaagacggttcggttgattgggggcaacaagtaaaaaatggtatagccttatctaacccaataactgctcttcttcaaactagtaaaatattttttactggttggaaagaggaatctgagtggaaagataatcaggcaaaatcaccttacaatggattttctgatgtaatgagatctacgctcaacaccattcgttatgcagatggcaagattgcttatgcacgagtcactacgtcaaaatcaggttatttccttggttttgataatactgctttcttaccaacttatgctcgctataaagttgactggatagcactgataactcagcaaatcattcttttactccttctcatcggattgctagtaactacggtacgagtaattttcaaaacgcttataacagtgattatctcacccctagtttcttacgcagcagtcggaaatagtatgagaatcttggaggtttggcaggaagttatgacaggaattgctgccatctggttccaactactattcgttaaagtagctcaatggttcttaattacttatagtgaagtgaaactcaatctaggttctggagcacctgatgttgctaagaaaactctaggtggaagtttctatgatggactagatccattccaacatgcgattgccacgattgccgtttacctaggtgtttacctagcggtttcccaaggctcaaaagtcttggaacgctggataggtattgatactaacctttcaagtggcactaaggctggagtcgctacaatggctgttggtgctatggctgctagtaaaatgggtggtggtgctagaaacttcgctgttggtaggtataatccaaatactggcagacgaaatcaaagtggatttaaccgtctcagaaatagtgttagtagtggaaccaaagttggtgtaaagggacttaagactgctggaagtacagtaggttcgactgctaacaatatcagacgaggagccttaactgctgctggtgctactgcaggtactgtagctggtacttggaatgcaatggctgatagacgagctcatggtcttaagtatagagagattgttggtcagtcaatgagtgctgctggacgcaatgtgtctaaaggagtcaaagagactgttaaatctggtaaagaagttgttggcaatgaattcaagaatgctagtcaaacagttaagagagacttctcaagtagtttcggagcaggttatacaagtactagagataatgttagagacaaaatcttaaatagtactggtggagctggaagaattactccaaagggagatacttcaagcattactcctccgactcaaagtttatcaaagaagaataggttagatagcgacagtcgattacagaaatttgatgctggagaagatggagaattgtaataacgagtttacaaagtttcgctacagtcttgtaagttaagattcttagtctatgttgagtattgtaattgctatctttgttcggagtatcagacgactacactgtaaagaaatgatagaacgcctattcagaacagccaaaaaataaaaagacaaacatcaaaagaatgtttgtctttactttaatcctgtatgagaaaggatggctttgacttataaacaccaacagggatatattacgtatgttcgtatagaattagtttaagaggtaagacagtactgaaaggtagtacagtaactcacactttaatcagtattctgataaataattcttttaactttcctattgattcttagccaatgtttaattcctttcgtttgttggtgacataagtttttaaatcaattacatcttgaacagtaggctcataattttcaatcattgaagatccgatagcataccaaacggtatcaaaatctgaataattatcaaaagaaattcctaaaattgttaattcttcttcatttacatcaagagtcatggcacacctctcttagattatagacaaactactttttcaaaggtggtttgttttttattttcttaacataatagcatcggctgaataggtttcccctcattatttctttgccatgaagaataagaacaatggattgaaaaggctgatgatgaatagaataataccacagataattaacaaaccaaatactgggaaaaagaaactagaaacagcacctactaggattcctattgaatggatgatgccatggagtgtcataaataaacaaaatagagcaaatattccagttagagacaacgaaaatttaaaccaaattgtttcagcagcctcacttatcgtagaaaaaagaagtgtgagaaagaaacaagcgataccaattagtactgaaaaaagtaaccattttaacgaggtccaagtgcttatataaagtgaaaaataaaaatcttgtaaaaactctagcatcctaaaacctcctaaaaaaagattattgcgattgtatttatttgattgtaacagtttttaagtagctagacaaggacagagagcactaaatagaagtgatcaatcaaaatcatggagaagtatgagtagctaataggtgtcactgggttacgaacgtcccatactgttttgtagaatagggaagaataatgtttatggaggaaatgatatgccaggtttaattgaagaaccagtattgacaaaaaaagaacttagaaaacgaaataaagaacttaagaaacaaaaaaaagaagaggcacgtaaaagtaaacaagctaagaagaaggaaaaacaaacacaatatgaaagtatcgaccttggtgaacgtgccggagaggaatttgtgtatgttccacttaataagaagaaacgtaaagattttttagacactgttgcgataactgatgtgaagtctatcctatatggctatcctaatcaaccgatacgattagctaatggctattcaggatatgtgcagatttttgaggtgtttgggcaagatattcaagcgatgtctaacgaagaacaggcagcaattaaagtaggattcactctttttctgtctgggactgcctttgacatgatgatccagacaacaaaattgccaacagatgtctcaagtcaatctaacgaattgctacgtctgctagatgaagtcaaacaagaacagaacgctccagaattgatcatcaatgatggtgatgacattgataccatttcacgtaaagagagacttgtttatcaacttagacaaagagaagatattttgaaaacaaaatatctcgtccaacaagtcattgcgatcaatcaacaaaatatcgagttctttatttgggtgtttggagatactttagctgaaattgattccaatacccgtaccacactaacgattgcctcaaaccacggatttagcccaaaagttgtatctgtcgaaaagaaggaagagctattgactcaatattacaactttaatgattcacttaatgtttcacttaatcagtactagaaggagttcacatggatttaagttcacgaaaaatcaagaaatatattcgagagggttatgacctcaatcttattagtaggattcaaagtgatattcctgatttcaaatatgatgatagatattggagacaagcaaacggttattataagattgctcatgttccatatgaccgatacccagaacacggtttacctgacttctggatgagtgatttaatgctcgttgataatgttatcagttttatgtccttagaacatgctgcaaatagtgaaatgtccgacctagcttcaaaagctatttcgaatatgttagccactcaaaatacaaaggctgcacaagatgccgatgataagatgcgtatcagttctttgttagactatcgtgaaaaactaggtaacaacgttccttctaaaaaaattcacactcgctttttattagctgcaaacacattggaacaactggtagaacgagaagctgacctcaagcaacagttgaatcagtattctatctcttcttcagatggcatgcaagacgtcgaatatcatacagcctttatcccagcttctcgtttggaagacaccccactacgtcgaaaagggcaagccgcatccgtctgggatttaggtgctggctatccttttaatcatacgaacttaatggatacctatggtgtttacttgggagaaacacgtactggtggtgtggtgaactttgaccttttgcatgaagatagggaacgtaaaattccatcaatgctgattgccggagcaggaaacgggaagatgaaactgttaggtaatttgattgatacctattttgctaaaggccataccatttttaacattgaccttactggtaacttaaaagaacttacggaacttcaaggtggtcgatatgttaagatgtctggtactaataatcgaaatcatattaacctcatgcaaattattgcaacggcttcctctgcagatggagaaacaacggaccaggttcaatctttctatgcccaccgtaataaattacgtgctttagctcaaattcttgattcagggttaaagaactctgacctcaataatttgtcttctgctttaaacgacttttatgaagaccgtagtctgtggaaccgtaatgcagaagtcatggaccaagaagacttaacgattactaatgttattccagaagattatccgattctatctcattgggtagaacgcttaaacaagcttaaagaggacaaaatcgcagagggaaataaaattgatgctgcaagttatgaccgtctctataatgctttctctggtctcttgggggattatcgcttcttaaatgcgacctcacagtttgaagatttctcaaatgaacaagttgtgacctttgacctctctgggattcaagatactaaacttcttaatattcagctttaccaagtgttatctatcatttcatcatacgctgtagcaaatggaagaagggtctctgagtatttccgtagagggattatcgggggagataagagccaacgacctcatagcattattaccattaacggagcacataagctcttcaattatcgttactcagagtctcttaactttttaaaggatttgattgagaatgtaagtagtaactattccgcatttattatggaaatgagttcattagataacattctcttgaatgcaaactctacggacgcagtggactacgttttagcgacacgcgcaattttctctatgatgacgtatcgtgtcttttctcaattaggtgatttgactatccctcgtctagcagatgctttacaaggggaaatgaccgagagtgaactttcgtcacttaaatatttaagagatggtgatttcttcctaaatattgcttctgtcaagaacttagtcttcaaccatcaactagcggataataggtcttatggtaagtatccgtatgatgaacatgttcgctatgcattcttaccttagaaatggtgaaagggggaaatacaatgaacctacagcaaccatattctgatgaggcattccaactacaaactaaaattctgacagaggataatccgcatgatttggaaagaattgtaaatgattacttagagatcttggcttacaaaaagacctgtcgtgttgttgatattacttatcagatgcgaaaaacacatcttttaagtagtttatgtggcttatttggaagtcagcaagtggatgagtactcagccatgattatctaccaagaacctgctcgatttgagtcgagaatatttgaatcggaagaagaaccagaggaggaaaattaaataatgaccacactaatgcaaatgtcactatgggttaacaatattgcttatgacattaagacactacgtttttttaggatagtctcctttattatcagtttagttcttggtttggttggtttctatagctatctcatgctctatcagacacttttattcgcctacggtgttcattttatggctattgcctatacaccatatgtgttttgtgccttgattgtagccctttatcagctacttactggtaagagacgtgaacgtatcaagaaagcaaagcgtatccttatgtttagtcttctaccaatctgtttgatgaatacctggggttttatcacactagtgacttgggggcttgcatgggttatggtcaaactagaatataaccatagaaaacgagctgttaagatcgtatcatttttctcaaaagaatattcacctctttttgaaaagagattggctaatcgaagtaactattatgcttatcaatctgcttatcgtctcctagacttgattcaggtgtcagcttatgaagaactctttaaggaagaagtgacagaaaaagattataaagccggtctcgttgttaaagagttacaccgtactttcagaattaaaggtgtacctttttctaaggtaactgtaacagataaactctatattgctccacaaaaaatgccaattattggcttaaggaggttttaatatatggtatcttatcgttttaaacgagatggtcagtatattcaacgtgaactagaactagattctcttaatggttatcaagaccaagtctatccggaaagcctcgaagagcaagtagattattcagcgttttacgatacctactatgacggttttggtgaggacagtatctcacgtgaacaagagaaaaaacaaggtctcattgcgcgtgggaaagaaaggttatccagtgtcaaggaggatgtgacagactattataatttgcaagtggaacgtcacaaagactattactcagatgaagattcattttggatgcgtaagcaacaacaaaaacgaaatcgaaaattcattaaacaaagtatctttcttgccctaggactattacttgtatttggttggtactggctaaccgcactacttcattaagggggtgactaagatatttgaaacgaataggtgataaagctgctcgtgttcttctaacgatttttggagtgaagacaaccattattataggaactattttaacttttgcggttatcttaattgcaattatcactggtttaatggggacgattagtacttccggtgggaaaggtggcaagactaacgcccaatgtgtaacctaccaaaaagatggcgatgaagaagacgatgatggctctaagcctcaatcgacttctactaaaacagactcagcatctgcaagcgattctgatccctttacgaaggggacaaaagcctatgaaaatgcccacaaagtctttatggccttagtgaatgccggactgtctggggaatctgctgcaggtcctgttggttgggcaaactctgaagggggctatgacatcattggacgtgcccaaggacattatggtggtggtatcaatgactccatttctaagggagctgttccaacgacaggtggtacgtctaacacacttggtggtggtggaatcttccagtttgaccccttcacgaaatatgcacctttaaatagtccagactgggaagatgctgataagatggttgcctttgttattgatgcaatctcaaaaggtgactggaacccagcctatgacgaatctggccataactggtcattccaggagtttgctaaacaaaccaatatcgatgaaactgctatggcatggaatgcctacgaacgaggtaatatggcttatgtcagaccagagcaaaagaaggcggatgcaaggaagtttgcggaagtcttcgaagcaagtaaatataagtacgatgatgccaagttccaaaaggcgtttggtggtggtggagcttcttccaataactcctcgtcaagtagtcaaagttcagatgatgataacggtgacgacgatgaagaagatagcgacaacgaagacaatgataacgatagcagttcaagtagttcatcaagtgactctagcaacaaggatagcaaaaaagacagtgataaagacaagaagtctattgatactgataaggctatcaagtggtataaggataagctagggaaggtcaagtattctcgtgatgctcgtactgggccagatagctatgaccattcatctgctctatactatgcccttgttgacggtggtgctaaagaatctggttctccagtagataccgattcagaacacgattggttgaaagataatggttatgagttagtgtatgagggtgcctggttgtctaaagatgatgttcaaaaccgtgaaaaaggagatgtcattatctggggtacgaaaggtagtagctctggagataaaggacagaccatgcttgttgaggataaggaaaatattatccaatgttccccatcgacagacgggattgctgagaacaattatggtcaatatcgagaccgtattactatggactacggaaaagtctatgtctatcgtccaaaagagtcaaaagacaagaagggtaaggatgatgacaaggaagaagtagatgcagatacgtgtggtgatagcgatagtagtaatctcaatactgatacaggtcagccccttgatgtcccttataccattacccaacttttcggtgcatcagctaatgctggcggtccaaatgcaggttcagggcacacaggaatggaccttgcagcaccagaaggctctccaatttctgccgtaacagacggtgaagtagtagaggtcaatgaagaggcgatgaatatcgatggtaaccacgtgatgcacactcttccagatggcactattatatattatggacatatgcgtgatgttcctcttgttaagaaaggtgataaggtcaaaaaaggacaacttatcgggtatgtcggacaaacgggtgcagctactggaccacatattcactttgaacgtcgaaaaacgaaagtcttccagtatggtgatttcttgagtccagcatcaattattttaggagatacccaaccacaagttggaatggtgattgatcctaagacacaaaaaggtggagcaccatctaaagaataaatcaagaaggagaaaaaatgaaaacaaaaatcaatcaaaaaagcatgtttttaacttccatctatttggaatcaatggtaggttttcaccaagctatctaccactaattgacctaactgttagtgaaaacaaggcaaaataatacataaatataattatgtatatactaaaaaggagtctgaatagagctcctttttagtcgcttaatttttaactttcaagttatgagtaggtagttaaattaagttattatgaaaagttataataggagtagaaaaagtgcataattgatttcaataaggagggacttagatttgcctaataatagttacgaagattttttatatgatgaggatcaacggctccatagtgtatatgaagttcaaaaagaatatgaacagaataatggtgatatttcaaagtatcgtgataaaatgttgtgtcctgaatgtaaaagagcgaaattacgttttacacataaaacatcagaaagaagagcatttttatcaacttttccaacctcaaaccatgaaaaaggttgttcatataattatgacctagcttcaaatagggcggttaagcaatttgtagcaacattaacagatgaacaagtacatgataggcttgaagcaatgttaaataccttgttgcctaggtatagaagagacaatgaaaatgcagtaaatgctgaacaagagaatccattcgtaatagatataggagcaagaaaccatcagcttaaccgaagagcaatatcaagaaagtctatgaatcgttggtttgataaagcggatgaaaacaacatattcctattttatggtaaggtaaggttatcagttgaagagacaaaaaccaagaaggggaaacggtatagattaattgtgaagaccaagagaggagtggaatggatccaaaagaccagaatttttagagggatggctaaagatgctatcgatgagaatacaacgtatgaccttgctgttatgggacaccttgaattttataatatccttccacaaattgtcacagaatcatggacttcgattttgtatagagaggcaaggagaaaagaagaaacaataaagtatattctttaaaaggtgtactttattttaggggtgaataatgtatattttagttctatatttatctgcttaaatcatgtaaaagccgtgttataatttagaaaaggaaaattatacttttaggaggacaacatatgagcagtcgtgacaaatacacagtagagttaaaaccttcagcattagatattaaacaaacttactctgactaccctgaattgaagaatttgctagaaaattcttcatatgatgatggaggtttcttcattctgaataacaataagatgtttgatgatgataaacggcctagtatttgtcagcataaaattattttggacgaaatacaaaatattgaaattaaaacaataaaggtattgttgtctaaacggtttaataaaaacaaagataattttgaagcttccgagactcataaggataaaaaagggaagtatttagagtggacaactaaacctgataatgtctatggcaaacaacacataaaaattgattgttcagtgtttcccagtgaggatatttttaatcgaggacatctaatagcagattcaattattgattattgtgacgaatttgattaccgtaaacgggaagacttcgttatgatcactaattggtgtaatcgagccaatactaatcacaaaactagaaaagcttgtggtatgttctattttgagaatgttatacttaatacattagaaaaaggaattgatgttgaatatagagttacgccaatctttaaaaagaattcagaaggtgcaaaacaagaatttgaataccttcctagaggcgttattttagaagctaaaacgctaaataaagaagcgtttgaagtagaagatgattatgttatcatgaatgaatttaatgtctttatcccaaatgctcaaaatggtttagacatcaattataaaacaggttcaataaaagccacttcatctttaactgaagcaaatgcaagccctgcagaccacattaaaaaattacctgaacatattataaaggacgcattatcaactattgcaacatatcctaaagtagcagaacaagctaatctatcaagaatagcagcagctacaagcgtgttgaaaaataaagaaattacacaacttctaaagaaaatagatagtgtgatagaacaatcaggtttgaagcggttttcagaacagaataaggaacttttcaaaagtctaaataaaacgtcacaaatcattagcacgttaggccaaagtattgccacagactacctcgtagaattaagaagacagttttcaaatttatctgaggtagtaaaagatgctcttactccatacacggaagaagagagaaagagtataatcgataaagtagaaatttttgctgataaaggctgggttatcttcttccaaaacagagcagtcgttaatcagcttttgttagacgatactgaagacattgaggtggagtggttagataatcttaaagagattatttcagatacatctaacatagagtatttagcgagatcacagtgtttttcttatcatctaatccagtcaatggcaatgagttattcagaacaaaactactacgcagcctacacgcttgcttcattagctattgatggtgcacttaatagattagcagagccattatctagtgaggtggataaagtgacagcagttggacacaaagcgataagaaaaattgatgagcaaataagtcctggagaaaaaacagtttttgactacggccttttgcattggtgttataacttttttgccgatacccaacgatttactattaattatccaaacagacacatgattggacacggacgttgggatgacgagatttcagaagaagagtttttaaaactatttaatgtgttactttatcttgaggagaattttgattattgggcaggaattattgatgaaaattgttaacttttagcaaataccattttgaagagctgacctcagtttaacgagactgtaaaagcactacacatgatttaatgctaagtaaatagaagccattataagaaaggttacatatgactacagaacaacacaatggggaatggtcaagattgggtgcgaacagcggcaagcctcggtggagaaacagggtcaaccccaaaagcaggtgctattatctcttttgtgggtggtggtcatggctcagatgtaggatgcgaacatgtgagttttgtcgaaaaagtttatccagatgggtcattccttatttcagaaacgaatgtcaatgacaatcccaattacactttccgtaaattatcaggaccagatagtaccatgagttttgcctatacgaggaaataatttgagctagtttttatatctcaattgacgtaaaagttgacaaagtcaaggaaagtttatataatgaatatgtaaataagagattactaacttgtgggctagtggatatggtctgcacccgcctgtgggctccgcaagcagcgtagactgtttgttgagaaaaagaatagcaggactgcctacccttgaggaatagatagggcatatctagcgtgaggtgaaactcaatacgtggaagagaaggaagcacgtgcttccttctcttttttaggagaaaattcaaatgacatatactttggaatggctaaagacatttgatggtgagattgatattttaaacattgagatgtcttgtttagccaatacgattgagaaatatgtttctcagtacaagtacgtttatcagacaaatatggaggcctatccagaaataattctttctgtcccaaattcctctatcccacatttattagggctatcgagggaacatcatgtcaatttaccgacaaataacgctggaagcatttttgaaggcttgaaagatgactggacattggaacgtctcaatggagcggacaatggttggtttaatgaaaataaatttaaaatagttggaaccctattgctctatcaaatgttacatggaatagaatgtaaattctatacgacggaaggtattttgaatagacagtcaggaaaacgttttagaagagataatatttactttgtagtttttaaattgagtaatggaattcattatacggttgaattatcacatgagcgaggaaatcaatatttcccacgaagtctaaaaattaatgattcatctattacaaattgtagagagattgaactaacactgattgataagaaacgtattaagagctctaaagtccgaaaagttagttggttctcttagaggaaaaatatgattgtaagatactgtgcttacgatacactatgacagtcatccactaattggtgggtagctttttctttgtccttctttgatgtgataccaagattaagctgtctttgtggaaaaagtttattcagatgggtcattccttatttcagaaacgaatgtcaatggcaatcccaactatacttttagtaagctatcaggaccagacagtatcatgagttttgcctatacgataaaataaaaagaataagctaacaaaatgtatcattgttaacttattctttttattattcctttacatggtagaagatgttgaatgagcgttagcatttgtttgaaaagtctaaggtacttactaaactaataatttcatcaaggatttctgagaaggagatacctgttgtataattatatttctttgaataattttcccattgttgctgctgagtaatgtcagacttgaatgttcttagaagttggatgatgttgttaaaattgagttcagtttcacgataggagaaggttctttcacaagctatctttaattgttcaaaatcaatgtcatctttctttaacttggagaggatatagacaccgtaaaaatccttgttgcgactattcaagaaaattcttgagtaaatggtttgtaatttttcagctaaagatgaaaatacgcttcctaaagttgtagaagggatgaagaggtagagggaactcatttttttaggagctgcccaaagttgctcgtaatcagtaggaaatcttttaagtctacgttaaatgcggctataatagcaatcgaagtcagtactacgagactagaaatcgtatttaaaataaaggctacaaaaagtttcgataagattatttggtgggcagaacctgggagtgtattggttagataaccttctctcccaaagacagtctttgcaaagcgtctaataataaggactattgtcgctatataaatggctccccatacaataatagtggcaaaacacatcagtgtgaagaaagcaaaaaagagtagactaggttcttcgttactgtgttcaaaggtgaacattaatttgtgaagcattaagcccaagggaatagagagtaggatggcaataccatagatgccaaaataccacttgcggactgattgtaattcagacttaactaaattccaaaacatgctcatacctcctaattgtggaacatctctctgaagagcttgtcaatagacttgccatgggcttgacggatattatcggcatctccttgaagttcaatctgaccgtattataagaagacaacttcatctaggacagattcaatatctgcaatcaaatgagttgaaataataacagaagcatcttcagagtattggttgatgatagttttaaggatatagtcacgtgatgcaggatcgaccccgccaataggttcatcaaggagatagagtttagcctcacgactcataaccaaaatcaactgaactttttctttgttaccttttgaaaggtctttaaggcgcaaatcaggctggagctttagatcctccaagagatgtaaggcaagaggatagcggaagtcagcgtaaaaatcttggaagaaatccaagtagtactggattgtcttactttcatctaaataggttgtgtcaggcaaataagccacttgcgccttagtgataggtgatggctgaaatccattaatggtcactaagccagaagtcggttgaaggagaccgttcaaaattttgattagagttgttttcccactaccgtttggacctaaaaggccaacaatttttcctgacgggatggacatggtcacatctctaagggctggaacaccattataagttttggtgagatttgttaaagttacaatatcagtcatcagtctataactcctttcctgtttgttcaatgtagtcggtgataatggttttaattttaggtgaactaaagccaatagtcatcatttcagtgacaaagttttttataaggttttgagcaatttcgtgtcgtttttgatcaatgagtttctcatcttcagtaacgaagcgaccagacgtacgagcagaatagaccaaaccctctttttcaagttcttggaaggctctttgcacagtgtttggattgacaccggcttcctgagcgagttcccgaacgggtaagagttgttgccctatgcttaattctttggaagcaattttaagtttgacacgataggcgatttgaagataaatgggtgatttttcatcaaatgtccaagccataagagactcctttctaggaaatatcattacattatttttgtactatagtaatgacacaaataaaaaatataatttgcaagtaaaaatctatattttctttaatttctttggcttttccctaacttatattcttatttttggtacaataggggcaagtatattcgacctgaagggggattattttgaatattttagcaacagaaatcggaataaggaaattgatacaatagtatacaaagaaagccttggaaacagctgtttccaaggctttttagctgtcattagctacacggacaaggtcgttggtgatgatgcgtttttatggagatacccttgatttgtaaatcgttaaattgtatgttatcaatggtaattcctataaatataattaagtaataatggatgaaatcacttagagtcattgatttcaatcgtattaagaggctgtacatataaaaatgcagctactttcataaagtttcacatagaccttataggtaaaatgaaacaattatatatcgattaagtttagaatggttatccagttattctcctatttgacaactaatctaaaaaatgtcataattggttttatattaggaggtataaatggcagaaaatataaaaaactgggttaatgtgtgtgtagtaaaaaacaataaaattcttttacttaatagacaacatgatgattttcctggatggattcctccaggtgggaaagtagagtttcctgaaagtttctttgaagctgctattcgagaattaaaagaggagactggtctaactgctttaaatttaaaattaaaaggtatttctggatttaccaatactattggtaacgaaaggttcgtatactacgattttttgtgtacaaatttttctggagatattcgtgcttctagagaaggagaacctaaatggtggaatttagaagatattgaagaaatatctatgcaagaagaaattaaaaataggttgcccctttacttacgtgaaggaagttttgaaagtattaattactgggatgagtcaaaaaaatgtattagccataataaaacaattttgtttgattaaacttttttgatttgtataaataaatattctacatctagctattcagctaggggttattagcacgaattgaataaactattcgctactatatctcctatcttaaattcatttattacttaaaattttggctctataatttctgtagtaggtaaaaccactgtaggaattatggagtctatgtttttgtagaaaaaaagccccataagacctataatgaaaaagtggccaaaccctcattagaaagaatcttatggaacaattaaattttatcacaaacatacttggaattaatgacaaaaatatttttatcttagattatcttgatgctggaacgcataaagaagtcattgctaagctcgattatcctgcctctaaatgtctcaactgtcaaggacaaatggctaaatatgactttcaaaaagaatccaaaatcccctacctcgaatgtgctggctacaagactctcattcgattgagaaaacgccgtttccgctgtaaagactgtggaaaacatactaagattagtagtgaagaaatctccgatgggagagagtactcactactttttctttatgttaaagtagtggtgtcttgtaaagtcgtagggctctatggcgctagacgtcgcttgacaaactggcaagacaccttgttttaggtggagtttgatcaaagtatgtgggacgctaaacgtcgcgtattgaaaatataatcactaaaacatggaattattcaagacaaaagaggtaatgtcatgcgtgcagtatttggaattgatgtaagtaaaacaagctctgaggtggccattttagtcaacagtaagaagattaatggctacaccatactcaatgatgccattgggttcaatcgcctgttgggcgacttgaaaactgttcataaaccaacttacgtgcaggaagaagtttatcaacacctgcgtgatttaagccgtttctatcaaaatatgacagaagatcttgttcaaactaaaaactgtctgcacaaggtcctacaagtcacctttcctgaattggaaaatctattatccacccctactggagagcaatattggaacttagtgatggcttttccatgcaaagagtttatattaagcttatctcaaagtaacttgtgtgagattatccgtcaatctacctccaaacgcatctctgaaaagcgtattgcttacctgactgataaacttataaaacttgctaaacaatctctttgtgcggtcaagaaaacctctccaatgcttgaagaggttcgttactatgctcaagaattgcttcgtctttctgaacgcagacaagttgtcttaaacgacatggtagctctagctcagcctttaccagaatatgacatcttacggtcaattcctgacatcgcagaaatcacagcgacatctatcattggcgaattggaagatattcgtcgctttcagtctaccaatcaaatcaacgcttttattggcattgacctgagacactatgaatctgggaactttctcgccaaggaacacatcactaaacgaggtaatccctatgtcagaaaaatcttgttcaagtgcattcacaacatcgcttcagctagtcataccaatccttgtcatatcccagatttctatgagaaatgtattacctcattacgcataacaaactttacgattactctttgacccaaaatcgataaggttgtctatgccgtattattgtagcaccttgtttcaaacaaataccagatgaggtgttttttagcatgcccttttatggatcaaaaagtgttaaaaataagacagtaacctcagaatagctactgtcttatctctttttttacttaaagccttgatagacttgacaaatggtagaaaagagtcgtttttctttgtgaaacatagggaacacctcacaactcttcttatctctattcttatctctattcttatctctattatacgactttacacaaagaaaagcccttggaaacttttgttccaaggactttgtcttcaatctgaggccttgatgatcaatgctttttatattgctcaaaagtcattcaacttttataagcaaataatatactccacttattgtgagagtgtgcatgaatatttaaaggattagaatgtgacatatgtgggacttgttttgaaattaataaaatatgataattaatacaagataactgaaggaagaaaaaataatgaatgggataggttatatacttaggaggttacggaaagaaaaagggattacacagagagttatctatacaaatctttgtagtcgaaagcaactttctaggatagaaaataatacatctttcccatcagtatatcttttatatcatatttgccaaagattagaagtgacaatagatgaagttatcaaattaacattagaaggagaaagtaatggcaatcagcacaagtgaattaaagtatgaattaccggtcgaattagctgctcgacaacctatagaactgacatcgagtagaagggatggaactagattaatagtaggttttaaaaactctcaaaaaatcattgatgatgtttttacaaattttactaactatataaattcaggagacttacttattttaaataatagtaaaacaatttcaccaattttttatgcatattccgataaatatggagaggtgaaatttcatattaagactaagactgatttaggatatgtatcatatatcagaattagagaagatttaaaagataaaattattggtgagaactttattgtaactgatgaaatagaagtatctgtaaataaacgaactgaaggcgatgaatttttgtgtagttttaattgttctgaagaggatttgtataactatttattaattaatggtgaggcagtgaaatcaatttatacaaagaaaaaatggtcaattgattattatcaaaatgaagttgcaaataaattaggatcttttgaaaacccagcagcgagtcggcactttactaataaaatgttaaatattttacgtgaaaaaggggtaagaatcgcgtatattactttaaattgtgcttcggttgatacaaaaatttttgaggatattatagagaaacatgttgtttttaaggaatactatgagatccccgaagaaacagtaagattaattcaagaaacaaaattaaacggtaataaggtgtttgcggttggaactacagttattaggactttagaaagctgtaattatgataatttcagaattacttcccctttaaaaaattatactgatttatatattcatcctggacataattttaaagtaacagatgctttaattacaaattttcatggatcaatgactagtagacttgctctttctgcagctgcaattggtgtggataatattatgaatttatacaaacatgcaatcgaagaaaaatatttattttatgagtttggggatgcgaatttattattcatgtagtttagtaaataactagaaagggggtgatgatatgaagaagttgacattgaaagaactggttgataaaaataatgatttgctctcacgttgcacaatcaataaataattaaccacggaaaaatccaatgaagaatgatattatttcttcattggagtttattttggagggcttatgctttataaagttaatcgagacgtagaaataacagaagaaaatggatatcaagttattcatagatattcagatgattcgtatttttccttagaaaatgatactttgtttattttattgagttataatggtttaaataaattgcaagatattgcaaaaagctttgcaaaatataaaggaatttctaataacaaagctttagaatacgtagaacaaatccaaaaatatttagtttcagaaggaataattgtcatagatgagaactaaatctaagttatttaataatatagcagaagataatatagactccctttatgtacaattgtgtaatttaatatataaaaatggtaaagttgtaatttcgagaggcatggaggtaaaagaattaattggggttaacttaattttaactaatcccaaaagacgctttttagaaaatgccaacagaaaattaaaactatactacgctattggagaattcatatggtatatgagggggagtaatagtttagaggaaattcagtattatgcccctagcatgtcacagttttctgatgatggttctattcttcaaggagcttatggacctaagattgtaactcaaatcgataaattgattacactgctaagacatgacaaggggactcgtagggcagttttacctatttattctgcgagtgaattaggtaaagatagtaaagatatcccatgcacactcacattagagtttttgattcgagctaataagcttcatctcattgtcaatatgagatcaaacgacatatttttggggcttccgtatgatattttttctttcacaatgattcaggaatacattgcaaataagataggtctaaatttaggatattattatcataatatcggaagcttacatgtctataagaaacattttgatagaataaaagaaatatcaactatgaatatacataaaacatcagaattcaataactcaaatttaatctttaaaaatttaagtgatttgttaaacattgaaaaatcaattagaaacggaagtccatacaatatgagcaaggaattacttaataattcggatttcaatagaataaagattgaactagagaaatataaggatagtaggtgagaaatgtctatcggaaaactaatctatatatgtggaattgatggttctgggaaaacaacattagccaagaatctttctaatcattttggtgataaatcaatatttttgccattaaataattcaaaaagattcattaatgaaattgatagtttctgtaaagagtataatacagacaggtggagtatattttcagaatattttaggggaaatatttgggcgttagagctagtttatttttgtgaaaatattttaaaacccgctctaaaaaagtacgaatatgtattcatcgatagatattatatatgtaatgctatatattctaatttattagtcactaataagttggttaatagactgcatgaattactgattaaaccagacatggttttttatatcaatattaatccagagatcgcttttgaaagaattttaaaaaggaatgagcaaaaaacgccgaaagaaagtttggacaatttaaaattagcttctgatttatattcaagatatcttgaagataaaagttattatgaattagacggagagaagtcagagaatcaaattttaaagtctgtattacaaattatttagaatttaggattaagatatgaaatttgaaacagtactagatttttatatatactatttggaaatccttctgaaaagggaaaaaaatcatactaaagttgtcccattttcggagatagctaataaagtcgaggttttcaacaatagtattgagattgttcaaggaactcatagtaatatgctatttagtagatctgaatttaattataatgtagtgcatatgctatattctttgagtgggagaacagattcatatatattaaaaaaatataaaagttcatattggcgatattcgaatgagggattttatgtcaatacaattggggagcggttatatactttatatggtaatcaaattaaacgttgtgtaaattttttaaaagaaaatatttatacgtcagatgccgtttgttttatgaaatcttttgaaaatgaaaatattgaatgtactctaaatcttcatttttattatagagataatcgattaaatttggagttatcatataaaggttctagtttattagagtatactaactccgatctatttatttattcttctttactttcattaatgagccattggttagatgtggaacctggaagtttatttttaaaatgtcactcgatttttatttcagaaaatgatctagaaagagctaagaaactattagaaattggtaaatcgttgagaaatattggtatttcaatgaatcataggttttcatccagtattgaaacttatcgttcagaattttctgaagctatcaatagaataattgcttgggatactgttgatattactcagagagtttctgaggaattagagtatataaaaaagtattttactccatatattcaagacttgttacttattcttttagcggatagatttcatcaaactgatagtgattataaaatagtattgagtcagctctcagataggtcaattgggaaatttaaggaaacaattgataaaatacaatttaataaattattagaggtaatttaaatttgataattaaaaagagtcttgctgctatacaacgttcagtatcaggaaatgaatttttgttaaatttacttactgataggacttttctccttaatgaagtttctctctatatttggagtaatcttggagaatgtagtactgaggaaatagctgcaaatttatctaaaatgtataatgaaaaaaccgagataattcaaaatgatgtagatgaagttattaatattttacaggaagaagggttaattgaaattctgaattaagagaggtggaggatattaatggctgaaattatttatagtatgattgctaatgagatttcagagcaattgtcagaggataatattgtaatttggaaatctgagatggatggactggggacctcattatctgatatcgatgcatattgtatctgcaaggaagaaaaagtaataaaaagctttgtatatgaagggacaccggttgatattgaatatgtgacttcggaaaggctaaaagctaaaattaataaaatttatcaatacactaatcatggtgatatttataaaggattagatgaagatttgaaattattttacagattacaaagaggagagaaatcagctaaattttcattgattggagttgaagttcccacacttgaggaaatttctaagattgcagcacaatattattatgaattatttttaggtctgtatgaagatgcttataaaatgtaccatgggaaaaataaattagattcttttgtcctttccctagagacattacaaatgtctattgcaacttatttagctagggtagggaaaccacaatttaagaaaaaatggctatttaaatattttaatatagtagctaacaattccctatataaagatttaattacacaattagaatcaacacaggaatatgatttaatggaattcacagagagtatactagtcaattcaaaaaagcttctagaaatttagtatattgaaaggaggtgagattatggtctataaaaaacctattgttgaagatattaaattaagtgcctctgcattacttgtataatatcttagtataagtcggagagttgaacagaataattatgtagttaatatgactaacaggaagtattactacaaaaaattctgttcaactttccattttttatagagtaataaaaatgagcaaaattaggtatatcataataaagatactattacatcaattttacggaatcaaaaatataaaattaataaattgtgttaaaaatatgaataaagtttatatttttgaagatatcaacaaaaaggtcaaaatggttttaaaagtagaatctgaaagaagaattaattcgatcaagtaccaacatatattttccaattatgggatatcgccaaaaataattaaaactagaacaggaagacagtatataaagatttatagattggtaatatttgtacaagagtatgtaacatctagtaaaagaaaggtcacttcaacagagattgtgggatttttaaaatatttttacggaaaaatggatgaaataagagaatatttacccgaagttttgactacttatccattatataagcaaggcgcattaagtaaatggttttatgtagtccatggtgatttacgtccacaaaatattatcattaccagggatagttttagcgtgattgattttgagtatttaagtctaggaattcgagaaactgaaattctcaagttaattataataatttgtaaatatcaaagtaatttgattgaatcgctatattctaaattcttagaatcagacgtaatagaaatgcatatagaggaggcgataagggttcttttgtatgatcttcttaaatcaaattttcctgaaaaggtcaagaataatattccaaagaattattttttagaaataacttctgaaagggaggcattaataaacttttgccatacatatttaaaaagaaaggaatcccaaaaatgatttcaactgagattgagaaaaaatatctacttacaaaagaagaatttctatcctttagtagagatttttttaaaagtgcaaaaattcaagaacaaactaattattattttgatagtttagatttttcactattaaagagaggaatgactcttagaattcgagaaaaatatgataaatatattttaacattaaagaaaaagaaatcagtcaaaataattgtagaatcggaagaaattaatttcgtaattacaccgcaagactttcaagaggcaatcttaactggagaatttccccaaaatgtaaagaaagaactagactcattaattcccgaaaagaaaattttttatctaggttttctaaaaactaaaagatatgtaatcgaaaaaaattctttgatatattgtttagataaaaataattattttggaaaggaggattttgaattagaaattgaaggaacagagaaaggactaaaagaaattgaaattgatatttccaagagcaaatctaataatgttggaaaatatgctagatttattgatgaattattgaaaggaaacggtaattatctgattaaaactcaagtgtctgcaattattcttaataaaagtagcgataaagtttgtcttattaagaaggatattccaacctcaagtatacataatatgtggcttccacccggtggacatatcgattttggagaaaatttaatagatgctgtcaaaagagaggtctatgaagagacagggttagaagttacggtttcaaaattatctagcattgtatcgtttcatcaaaaaaaggcagagcaagctatttgtttcttttatgtcgcagaatcccaaaatattaatgaaataaatgtcactgagccaggcattgaatgcaggtggtttaatttaaaagatatactaagtggagatgatataaatatgacatcctatcataagcttataatatccgacttgcaagataacaggattttatatttgaatttaaaaaaatctgataatcaatataatattgaaaatatagttcatatttaaaagattaaaactagttatatataaaatctaggtataactgttccactgaattccatagatataattagcttcttaaatgtagggctattttatagcttgaatatacaatataagtgcacaataaaaactcataagattttctagtaaaatagaattgaacgaactagttacgaaaggaaatcttatgagctaccatcattttactatagatgaacgtgaaagcattctcgtttaccgtacgcatgacctaaatttttctcaaattgctaaatcacttcatcgtcattagtctagcagtagtggtgagtggcaacgacatcttaaagaaggaagctattctccaagtcatgcataggaatcttatcatatggctaaatcacactgtgggcggaaacgtatgcttgaaatagatcacaatttaagcaataccgtcaaacatctatttctcgattaccaatggtctcccgaagaaatagaaggtcggttgcgattagagtatggaaaaactgttattagttatcaaacaatctatagagccatttacagagggcattttgatgataactcactatctcatggtgctcgtggtgtcattcgaaagctccgtcatcgtggtaaaacacgtcatacaaaaggttatgtcgaaaatagagggaaaatctctatatctcatacaattcacgaaagactagaagatgctaataaccgaactagaataggagattgggaagccgatactgttgcaggtaaaactagaaaagcttgtttagtgactctaactgaccgttattctcgttttctaaaaatccagaaggtagctgtcaagaaaagcaagttggtaatagaagctatggtaaaaatgttagagcccttgacgaagcatacaataactcctgatagagggaaagaattcacgtatcatcagaaattgagcgatcaattgaacattgaagtctattttcctgaccctcatgctccatggcaacgaggaaccaatgagaacacgaaaggattactttgagagtattttccaaagggtagtgatctaacattggttgatgatcagactattcagctgtgggagaacaaacttaataataggccacgaaaatgtcttaactggaaaacaccttatgaagtattctatggggaaagtatgcacttaatttgacaattcaagagtaaaataaatttagaagacatatttttatttgatttaagttatttgatttaaggaggcgaaatgctactagctgtaataagaagaaactggcagatgtataaaagatattttccagtaacattgttttttaataggggtttggatgctggttttactctattaggtttgtggttaatagcgaattttttattcgcaaataacattaaagttggtaatgctatagagtactcagattacttcagttatgctgcagtaggattggtttattataatgcatcaattgctattctgatgaatgtagggagagcattaataacagaagttagagaaggcactcttgaaagtacattagtatctccttttaacattgtctattattacttaggaatctttttagagcagtttgtaaggacctttttggaatttctattttcttatataattgctattttgctcggtgcagatttacaacaaattacattactgattttattgcttggcttcttatatgtttcgatttgctctttttcgatgggggtattcctatcaaatataatgttgtggtttagggatacattcattagtcaaaatacaatttttctgataatcttcttggtctcaggcattacctttccaatagaattattgccaaaatttttaagggtgattagtaattttataccgttaacatattctattaaggcaataagaaccttatatttggaaacccagacgagtatgatcaatcttagctttatacaaggtttactactttcaatattatacttcttgatagggattctggtatataataaggttgagaaaaaaattgtaagtgatgtttcatattaagtgaaggagagaaataaaatgtatgaagtattcaatatttcaaaagattatgtaacaaaaaagagaataggattgtttaaacataaaaaagaagttaaaaaagctatacaagatgtaaatttatcagtccctagaggtaaaattattggtgttttaggagaaaatggtgcagggaaaacaactttaataaagatgatgacaacacttctatcaagtgatactggaaaaattttgatagatggagttgacattaatcaaaatgtaaaaaatactcgaaaaaggatcaacatcattagtggaggagaaaaaaatctctattggagattgactgcagttgaaaatttactctattttgcttctctgtacggtcttccaaagaaagaggcattacctaagatagataatttattgaatgaattagggctttgggaaagtaaggatactcctgtagaaaaattttcaaagggaatgaagcaacgcttacaaattgctaaaggactaatcaatgatccagaatatttatttcttgatgaacctacactaggtctagatgtcagtattgcttacgagttgagaaaaaaattaaaagagatagcggctaagcggaatacaggaattttgttaacaactcactacatggctgaagcagatgaattatgtgattatatttattttttaaaacatggtaaagtaattgtgtcaggtaccaaaacacaggtttttgaacaattacagatgacaccagagcttcatgtcatcctttcagatagggatgatgaaaattcttcaaagctggctcaagttagtcgtttatttccatgtataattttggaaaaatttggtagtagtatattgttgaaattctctctttcagaatataatgtgcaggatataataaaaagcctatataataatcaaattgaaattaaggaaataagatataatgagcctactcttgaaaatgttattctaaatttaggaggaaagagcttaaaatgaattcgataatagttagtacttttaagagtgaatttagaagaacatttttaaatgacagtattaataaattttattttttttcaatgatactttggccaattatttctctaattcaaattttttacaatatgcaagcctttccaattacggatatacaaatagcatctctaagatatgaagaccaattaatttattttatatttattggttattgtgtttacatcattttttcaaatgctgttcagagtgcatggaggcttggtggagaacgatatcaaggaactcttagtcaaatttttattgctccaattaaaaaaaatctatggctttatgcacgtaccttatcacttattttaagtaattcatggttttttatcactatttttattattggaaattttgtctattctgatgcttatgaatatattcttgcgtccacttttattttagttgttgcatcctggatttgggcaagtttcttaggtagtatttgtatcagtttgagagatgcaacggtagtttatgtattattggagagctctcaaaatacttttagtggtgctaaagttccattatcaaaatcacctcgattaataaaagttatagggagtttatttcccattagctacacaattatttatctaagagatatacttctttataaagagattataagtataagtgctatttggtgcttatgcataaatatctttgttattttattaacgaagatagtgttagaagttggagaaagacacatgaaaaaagtgggcagttttgatttattttgaatcgtgcttaactagctatttaaatttagagtaattatttcatttaatttatattttatcaataataaaggggtagtactaaggaaaaattatatagagagttagctgaatcctcttcgaaactcagtgaaaaatagttcaattattgtttcgtcagatcaacacgatttaatcatttgatacaatgctcatatctttcaatactcaattgtttttacaacttttggatgtttaatttatacagtctacgatttctaccatattttcaaccttgcaatcaagtgcaatacatattttcaataaaatatcagtagtgatattttccccttttcctaattttgctagagaagaggagctaatccctacttcttgccggagctttgttttgattcaacctttatcaatgagaagtttccataatttattataactaaacttcatctgagttttttcctttgttccatgaaataccgtagagttcatttccgttactagagagtctcagtacagtattttctgacaagagatgattagcttctggataatacgagatagctttatcaaaggataaaaagacttgtttgttcaatgattttgattggtcatatagcttcaacagggcttcggttgcttggtaactaatattacttaagagtaatgaatcatgggcaagtgctggaagattagttagatagagtattgctaaatcgtacaatatcattcctttgaacttagttcctgtaccgtcgtcgtcaggggtatagaaggaatagctattataggttctgaggataatttgaggagctttgcgaatatctggataaaggaaatcattgaattctcgcattttagcattgatttttccttctagctctattagaatgtgatccaacgctactgtattttcaaaactaatatattctgttgggttttcaatcccataaacagattgcagtaggtctagccaaaaagactggctctcttgtctttctctaccacggttttcccaacgcttaataaaagccttggcttgtttttttctgttctctagtgttcattactactaattctttctaaatagactcggtgtcattgtaccatatatttctactgtattttagtaggtattatctacattaactaactgtcaagtgactagatataacttggggggtgtcacaccccctaagtctcttttttaaaacatagaaaggtgctatactaagtccatgaaaaaagattctaagtacattattactttggtggtcattttcctcgctcttggagtcatgtttttggtctctgccttaatgaagaaaaatgaaccgaagaaaaaaataacaccccctagcaccgaacaggtgattgaagattcatcctcggaagacattctaaaagaagataagtatgagagatggcgtaaagaggcacttgcgaccttagaaacacaaacacctgcagatgatgctgacacgcaaactgtaaagaatgctttgaaagaaatgtgttcttatgttgagactgttcagaacgtaaccgatgttaagccagattatcaaaatcacttaactattactagcactaagatgcagtatgagcttgtagcgaaattcatgctaggttataagtactctgatgctaaaacgcaagtatttaaagctaaagcggacaatgttcgtcagtttgtccttgaggttgctaacccagatggtgcaaaactctatttctgtgggaattacgttatgggaacaactcaaatagaagtaacatcagttcatggagtagctgaagctgatcatgctgaacatggacatgattaaacgtagtcaatccgtcttacatatcttgtttagcttcatcaagagatggagcttttctttatctattcaactctaataggaatttttgtccctgtgtaagtgcatatcttcttaatccttgatataatagtgccatagcacagggattaaagaattggtgataataagagaataggattaaagaacgattggagatgaggagtcatggaaaaagaaacaaagcgtcttttaaggaagttggtcagattatttgacggacagactaaggaatatcttttaaaatatactgatgatgttgctgagttaaatattgaagaacaaaataaactagctcaagagttaccggctagacacttaagtgctgaaattttaagtgatattcaacgaattaaaaacggtgaagaaccacgtttctttactaaggatggacaatataagggactatgtgttgaagaatacaaccagcgtgactttatgactcgtcagcaacgttacgttctaagttgggcgtttggaatgctactctttttggcagtctttacaattgtatcttggaactttgttcccaacgttatccaaaaaatggaaactagtacatcactattgaactatactgagaactatggcactcgtcctgaacaggtctttgcaatggttgtatgtggtgttttattgatattactttcggtagttgtttcactagtatgtttgaagaggtatcgtaaaaatactgaagaacctatcaatgttgtattaaccgatgatttgagattataaaagctgaagcttaagctttggcttttttggtgtttttaaacttgatcgctacatgttactgggaaaatgtagagtgtcataatgggactttacggtacttgatatttcctaattaaataaatatatagccagatcattttcaatgttacataataaaaagataaaagtacatgtaactcgcactttattattaatttgtttgtacatgattgaatacaggaacaggtgcattgttaatgcgcttgttttatatatctatattgataaaatataatcatgagataaataaaaaactaagggaacagaattcagtatcattttgatttaatagtctttctgttttatctagtaaaatagatatttggtttagctagataaagtaatcaaggacttttagtataatgtgacgaattcggaaatgaaaggaaaaagtaatgtttgataagttagattatagtatgaagatgatggctcgagaaattgaaggcctagaatttgttgaaggaaaataccttctggatcctaatgaccctaaagctttcaattcgatggaggaaattgagctttataaggaattggcgaagaagtcagctattgagtttcttaaggaagaaccagaatattcttcaaatccatttgaagagcttatgaaagattgaggagaagtagcatagcctatggttccgttactagaacttcaatacaatttattgataacaaatggcaattcaccatagttaattatagttgttagtacttgggaggtaaaaaatgacttcagtaacaaacctaataaaggtagtgaaacagcctagaggtggttacataccattgaagcagttttcagcgattaccttagatgacggaaaaaccttgaattcagatgagtctgtatcgcctggacttgttggtctggctgtagactatctaacacgtttgatgaatggtgctcagcccaaagaagcgtttaagatttctttaaatggagcgtatctggttggtgaatttgataaggctatttcactattagaccaaattgttggactagataatcaatcaattgctgctgcatgtattctggtgggttatgatgttgcttttagagcagggcctgctcgttttatgacagttgatactattcacgctgatgaagccacgattgaaaatattcgtatcatggtacagcgaagtctacacttctttgaaatctatgggccaatcactttagatggatttacattcgactctgcatatacggacacaatcacatcaggtgatggagattacttaaccaaggatactctctgggatttcaaggtcataaaatcaaaaccaaataaggactatacgctgcaggttcttatatactatttaatggggattcgttccaatcaaccagagttcttgagtatatcaaagctgggtttctttaatccacgacaaaatgtagtttatcagacagccatagctgatattcctaaggaagttattgagattgttgaaaaaaatgttattggctatccagactagatagtctggattttggaggttcaacatggaaatagatcgttactgtaatagttgtctaggatactattcgtatgatattgatgaaacagataattacgaaaagtgtcgttggtgtggctcagaagatactgaagaagcctgaggttaaaggtatcccaatgctattttctctctttgttttcatacactcttgatgcttatttggaagagagagctttcaacactaaatttatcgcttcatagtaggctctataatttctgtagtaggtaaaactactgtagagattatggagctattttctatttttggggaacaaattaccaaaaagcagttatcgaaagaacattaactatatctttccctgaataccagtaggaacagactacaaatattacttaagtaggagatggaaggtttacaacgacaggacgagaccttaccccgtaattggaaatttatattaaaggatagtgcaagcgtacttgatggagtgttagaagagaatgaggcgaggaagcttattaatttgcaaactaaaagcactgtcacttcgtacttagtgccagcagaataattattaaataaacacctcgccccaagaatagtgcctaacttcaagtgatgagaactgctggtcaggggtctggacgagatatagcttatcactatcgtgaaacaaatcaaagaagctgtgtactgcaacaactagaggagcaggtacaacaccgccctgtatctttaacttttgaatcactgagggctttattaaagacaagaaaaaggaatttatcaagtaaaccttgaagttgataaagcaacgtctaaaaaatagttcattttaaatgacttttgaaaatttagggctctctgcgcttgctcttataatttcctctgtgctacactaatcttagtttaagaaaagacgattcaaatatctatgaaaggagaaaaatatgaacacacctcgtattaaccgatttttaggtgaatggttggacagacagactagcccagacttttttaaaaaaggtttgattcttctgaatgcatatgactttctcgacagtaaggcggatgccattcctggtctcatcgctcataaaaaaagccctctacgtcggcaattagatgaagctctcgctagtcgtgggtactgttatcttaagcctattaaagtcaatgctcaaaactccattgaagtagagaagtactatcgatttgaagctacacctaaaggttccaatgaacctattacttactatggtctaggtgcgtactttatttaccgtgctatattcaataatgaattcgacattgattctggctttcaatatgatgacgaagaactcttttatgaagacattggatttgatgctctattccataataaacctgtttttctattaggaaatacgccctctgatgatatagaggtatcttggcaggatgttgggatctcaatccgtagacgggcctttaattagttagacatcgaatacaatccacgaatagattacataagagcagtatgctctttttttgtgttttcatagggtgtcactgggtttgagtcagggatgacttttgctattatctgattgtaatttttttagaaaggaaattgcttatttatggataaaaacaaacgttcaatgatcctaaaatctggagcttttttaacagcccttgtagcaacaggtttggttaataatggggtatcagcagacgaaactgccgcaccaactggaccaacagataatgctactgttgcgactggacactccgatacacttcttcctcccgcttcatcaacaccagcgacacccggtaccaatactacagatgtcccaactgctgaagcacctaaagttgacactccaaaaaatgaaggtgtaacaactgagacacctaaagtaactgacggttctactggtacaggtgtagctacacctacgacttctgaaaatgcaaatacaactgctgaaacgtctacagttacctctgaaggaagtgaaggaaactctacttctgatacaacttcaactgcatcagaaacacctaccccttcagagcacacagtaactgaaactcctactaagcctaacgctacggatactgctaatactaaccataatagtgaaaataacactagcagtagcagtgaaagttcaacaaatcctgttaatgataaagggtcaactgttgccacaccaactccagcaccaactgaagggaataacgcttcaagttctgaagcacctagtggctcatcaacttcagctgaatcttcttcaacaagttcagaaacaccaaaagtatctgatggaacatctggaacaggtgtaagtttgccaagtagcgaaggaacaacatcttctgagaaatcatcaacctctccagaactatctgaaactgctataaatacacctcatattcttgacggaactaatggaactggtgtctctacgccatctgaacataaatcagacaatcgtacagaagtagcttcaacttcagcagcatcttcaaacaaagtagttgagtctcctaaaactgaagaaactcctaaagttagcgacacgaatgttcaagaagcacctaaaccaggggacgtttctccttcaacaaaacaagttgtacttaatgtgactcctagtcaaccagtcgtcacaaatactggttataaagttgtctcaacaaacaatagtgatcttatcgtacaaaacttcgatggttctgtagcctcagttccagcttcacaggcaggaggagcagtgaatgaggatggaactgtctctgttaagaccgaggcaggagaaatggtaacacttcctgaaacaggggaagctggaacaaaactcgttacctttggattcttgattttggcagcacttggtcttcaacgtacagctgtaaaacaagataaatggtactcaaactaagaaaggtgattattttaaatgtttaaagactcaaataacacgaaaggacatggctctattcgtaagaataaggtctatggagcagtaggtgtacttgcactcggtgctgcagcaatcgttggaggaacttctcaagcatccgcagatgaagtaactgaagctcctgtaaattcagaaccagttgcgacctcacaagcaaacgcagacagccttatgtcacaagctacagctgttgcgacttcagatgtctctactccaacaaccatagcgactgcaacaaacactactgattcacaacctactgaaacagtagcagaagtagctactacacaaccagtaagtactaatgataataatgcttacgctgaaaaggctaatacatctactgaagctgaaaaggtaactatcgacaacacagctgtcacagatgcagttgctactgcaaaagacagtggggttaaagtaacacaagatgctacgcaagacaaagggacaccaaccacaagtgaagacctcgcaacaaagcaagctgaaatcaaggccgaccaaaatgaacaagtagctacaatcaaacaagctacccaggacgcatctggacgccaatcagcctatgatgcagctgacaaagctcacgacacacttgaaactcaagtagacaaagcggttaaagatagtaatggacttattaaagctgaagctactgaaatctcaagtggggatggtaaaaatgtaggtgattacaacacctatactgaacaggttaacaagcagattgcttcgaacaaagaaaccatcgacaaatttaacaaagattatgctgctatgaaggataatgctaacgttaatgttgatggacgtgtgacaacacaaaatgttgatcaattgacttacgggaactctgttcaaaatggtagtgttaatccagacggcaccttctcattcacgcacgatatgaatgactcagctaatgatagcttgggtgttttgggtacaggtacccttaatggtaaggttaatttcacgtctgctgctaacggagacggttcgacaaccgtaacacttaatagtctcgatttgtggaactatgcttatacaagtaaccgtctgaatactggtgttaaccaaaatcttaactaccacgtttacacagacggagaagaaatctactcagtaaaccatgatggtaactcaagctttgcggaagatatcaatcgtagtattgcacttaacaagtcctatgtcttgaaaccaggcgaaactactggtattatcccaattcttaacatcgatgataattggattatcaatactcatggtcagttaagtctcgatttcactaatccaaacactgtaccatcagctacagttaaaaaggttaatgaacctgttaaaccagaaattccatcagcaagttatcatgactacagtatgaattatcaaccaactgtaactaagactgtcctcaacagcgacggtgaaaatgttaatggtaagatgattcctaaaaatgatgaacatacctatgttttgaataacggaaacatctttgccaatgcaaaggttggcgatactgtgacaactcgtgatccacttgaattcggagaagttccaaatatcgaagccaacaagactgaaaatgaggctaaaggttggaacgttgattatgatgaggcttctaagacttacacatttacagccaaatatgatgggaaaactcttgaagcacctacaatcaagttcgtagcaacggacgataacggtttctacgataatacttataaagctggtcgtaacggttacgaaaccttctctgatactgtcactaacaagacgccaacagctcctaagccacataagtctgttacagactcaaaaggaaatgacatcgatggccaaacgacatctgatgataaagtcaacttccatttgacaactgactatagtccatataaagacatggccgcttctaagaaagctctcgaatttgcacttctcgatgacgtgcaagatggtgccttcactgtagatgaagatgctattactattcgcgatagcaataacaaagatgtcaaagaactctttgatatgtatcacgtactttcggatgaaggacgtactgatgccatcaacaagatcctagaaaaatctggtcttaatccaactggtgagttctatctctgggtagccaaaaatccagttgattattaccaaaactacattcttaagaacaataatgtaacagttaatctccctgctacattgaaagtccctgcaggtactactgtagaaaatgatttctatcagattgattttggtaatgcctataaatcaaatcttgtttcattcgatacaccaccagcagcaccagtaggagagtctggcggacctacttctaccccagtaactccagtagaagaagtgcctgtccaacaacaagctattaaggttcttcctaatactggtgaaaaatcaacttcagcgtttgctgcagtaggagcagttattctagctactacactaggtatgcttggtttctcaaaacgtagtaaagaatgctaagataccacccacttcttaaaaaatccttttccctattctaaattcataattccctaaaagcacagctcacaagagttgtgcttttttaagaggtgtcactgggttacaaatagatatttgttttcctataataaagaagtactttaaaacaaactaggaaggaagttattgcttatatgagaactgataatttatataattatgaacttatgaaatcaagaccatataggtagaaagaaggtatctatttgaaaaataataaattaatgttcatgttgctgatgaaatggtttgctgaaagtatttatttccttgaaatcatatttataatagccacttcagttctgttattagcaaacaatattttcaatgtttcaacaaagacgattcatattgtcgccctggtgttactagtgttttatgtatgtattggtttgttattagctaaccgaaaaaataaatttacgatgtcagttaattactttaaattgataggagcactagcttatatcgtcctgatcaccactctaaaaggtattgtgtttgatattttgacacatccactggttaccttagagattgcacttccatattttttagctattggcttacgaaatttcagtaagagccagataacaaaaatcatttttgatgaccgtcataacgcaaatatcagaggacgatttgattctgtagaaaatataaaggattctatgcgtacatctatagctagtagcattactcctgaatttaatggacttatggaaatcagagatgaaaaatttaggcaagacacaaagggtaatgtagctggaatgttcaaggtcttgctaaaatccggatttcttgggtttaaacatatcccattgactaaagtaacactgacatttaacttagaataagaggtaatcacgatgaagaaaaatattttaacaacggaacaagcaagttttttgaagcagtacaatttctctctataccaggaacgttttgaggtactatgtaaagctcaaaaagctgaaaaggatgggcatctaaattttgcctcggacgatgaatataaaacatttattgatgctgtaatgactggagaatggtctgaagaactctttatgatcaacctatcaaatcctattggatgtgaacatttccttgcagcacgagaagatgacaatggcggaataatttgggatgtcgtcgattatagtgagggagaccgcttcactaaagaacaaatccagacgattgttccagaggcatatcgatatagtgcctttatggtctctgagattgctgcagacaaagactggggtccagaagctcaacaccaacgacttgaacaagctaaaaagcaagcccaagaacatgaaaagcctatcgagaactttccaaaacctcgtgtaatcacagaagaagaaagacatgatgactatacacaaagttctatcagaacagtagcagcaaccttgagacctgcacaataatcataggactagctaaggatagcatatagtgatgctaagtgtgaatataaaaaaagaccaacatcatttttgatgttggtcttcattctgagctggactgaggtccggctttttttgatgagtttaagtattttgtgtgaatattatgagcttcttttctaaaagtttggagttactttataaaatgatattgagtttgtgtgtcgtatttatgtattgtgaaataaattgtgttgataatttcttttatggagagtatttttcaatttttagggaaaattataccgttatttaaaaaaattttaaagagtagaattatttggatgcttttaagaaaaattaaattagaaatcatgatgaatatgtgaaggtttagctttctgcgtcctcaaaaaattaaaggaaaataaaacgagcatatattggcattttcactgcaattgtaatgattttacgcttttttaaattgtgtaaaaacagttgttttttaattatcaatctaatcttaataataattaaatgataataatagttctaaaatatattgaaaaaccttattttaaaagaatttattaactcgaaataatgatttaaattttcaaaaaatacttgacacccttaaatttcgggagtaaaattctaatagttgtaaataattattcatccagggttaatttcgcgccagcctacgcgggcgcgaatacggggttaaaccccggaaccccttattatttttgaaaacaaattattttattgagggataacacttatgaaagaaacaaacaacaaaatgaaatttatcgctggtactgctgcaattgtagctgcggcttgtgcaacaggtgttgtaaatgctgatgaagtaacagtaactacaccagacacaaatgctgtatctgaaacacaagctcaatcaaccgttactgaacaacaagtatcagatgcaaaacaaaatatggaaaaagctgaaacagccgctgttattcaagaatcagcaactggtttggctcaaaatcaagtaaatgacgctcaaaatcaagtgaatgctgctcaaagtcaagtgactgacgcacaagcaacagcagcacaagcgacacctgaagccatcgctcaagctactaatgcgatcacaacagctgacagtcacgtacctgttgcagaaaaggcagtaactgaagcacaagctaccgctacaaacgctcaaacggctgtgacaaaccaaaaagctgttgtatcagacgctcaagcggctgcagataagtcacaagctaaaagtgacgctgctcaagcaaaagtagatgctcttgcaaaagaatcgacagatgtatcaacagctcaagataatgtaacagtggcagaagcaactgtagtacgagctaaatcagatgtgaaaacagctgaaacaaaccttgaaacagctaaaaaggcagattcaaaacttgaccaagcaatttcagatgcaaacggttccgtatcaacagctgaacaaggtgttaaagatgcaaaacaaactgtaacagccaaagaaactgtcgtaagtcaagcacaagcagcctttgaccaagcaaaagcggctgcagatactgtcaaaccattagcgacatgggaatcaaaagttaatattccagaagaatacttgaatgcattgaagaaatgggtgaatgctaaaggtgctgaccgcacgcaagcagctaaagacgctcttgcaatttataacgcgcttccaatcacaacagattccaacatcattaaccaatatactaaaatcgtacatgtttatgatggtgatatccattacgacgcaaacgataatgggatttgtaattacttttatccagacacaattaaagtatatgatgatactaaatatgatgtcgaaaatctcccagaaaacgtgaacaatattgtaaaccaatattttatagatcaagttaatgcctttcgtcatgcactaggtctacccgatgcaacacttaacactttaatgatggatgttgcaaaagcacgcgcagtgaaatacaacgcattacgtgataacactaatgactttggtcctgacctctcattttggctttcaacacaagcagaagtcaatcccgaattgaagaacttgcttgttatagaaaacttaacaaatcaacctcacttcaaaccgttctcaggtgatttggcatacaaacgatctcattatgcaacattaagcgaaattctagagggtgttcgtgaagctgtatttttattcacagtggatgatgggacaaattattatggtcatacagctagtttgacggactacgaccaacaaggtatttcaatgtacctacaagacaacagtaattcgtttattgaagttccagcagaattcaatgttgtaaacgcaatgtcaagattgagtgacgctcaatttaaccaagactttgcaggtggtcatgtatatgatgtattgttagcaggtcgagcaaactttgagccaagtgtagatgcatacaataaagtagtattgaaacaaacaactgcaggtgttgcgttgaaagctgctcaagaagatgttaccgtagctaaaacagcagtcacaacggctcaaaaggctgtcgatgacgcaaaagcaaaagtagcagagcttgaatcacgtgaacgtcaaacaccaaaagcagaagctgaattgagtgctgctcaagctaagttgacagaagctgaaggtaaacttgcagtggctaaagttgtgcttgcatccgtaacagctgaagaagcaactaaagcccaagcgcttgcacaagcaaaagcagatgctaaagttgcaaaagaaaaatctgatgatgcaatggttgcacttgcaactgaacaagctaaattggcagaacttaaatcagtagctgaaaaagcaaataacgatgttgttaatgctcaaaaagctcttgacgacgcaaaattggctgtagaagctgcaaaagctcataaaactgaattagaaaatgcgcaagctaaccttgcagccgctcaagttaaccttgcagccgctcaagttaaacttgtcaacgctcaagctaaacttgccgctgaacaagctaaacttacagacgctcgtagcaaatatgcatcagctaaatcagaatatgaaaccgtgttgactaaatatgaagttcaaaaagcgttagatgatgctaaaaaaggtaatattgtgacacctgatactaaacctgaaactggtaaaactgacaattctaagccagaaaataaagaagttgagccagaaactgacgttgtaaaaccaaatcaaggtgcaaaagctaaatatgacgatgttgtggcaccgaaagtggtaagcagtcaaggcgaagcagcaccagtatcagtatctaaattcaacaagacacaagaacaaacagtcaacactgtagcagaagctaccgcagtagctgttaaagccggacatcgtcacacacttccagaaacaggtgataatgatggtgttattgcaagtgttgcaggtattggtcttcttggccttcttggatttgttggtcgcaaacgtaaggaaaactaatcaattgattaggggcaaagcataagggttgtagaacgacgagattataaactttcttgagcaagcgagtgatggttcgatagccgtaaataaagtgattttccatacagagttgttcgattttatctgctatttcatctcttttctgagaattcttatactcctgtttccagcggtaaaaggttgagcgtttgacaccgaaacactctaaaatgattgatacaggacacgttttcttatactcttccactagcttgataagacttactttgtagattctcttaccaagctctgatacttttttagtaattctacctgcaaacgtaactgttctacttcggataactgtttcatccctttaccataggtatattgtttccccacaggttggtggaaacggtacaattcatcattctgaggatagcatatagtgatgctatcctttttgtattgaatcatataccacgcgcaacacttcacttcacaactctagtaattttcttgaataataatcaaaagactactttaaaatatgagaatgtttaagtataataaaaacagaatacttaataggaagtccccgttagctatttggggtaatgaacacttggtttttggagattaaaatgaaatctgattttatgaaaagaattaatacaaggaaaagtgccataatttctcttatcgcactattttgtttcggtatagggtactatgtacttgcaatttcaccacatcaaagagcggtacagtcatttaatgaagtaacagccaaaattcaaaaagaaaaccgtagcttagaggaaacaatcaaagtatctaagaaactacttagttgtaaagataaacccttagacgaaaagctgacggttgagttaaaaaacgaagtctcaactgctgaaaagaagaaacaagtaattcctaaaattaaaaagaaaacaagcgacatcaataaacaagttaaatcactaaaaaaaccaattaactacacaacagagataaaagaacttcaagataaaaaccagaagtattcaacaagtgttaagcagttaaaacaaattacaaatccttccaatacatttgtggaaagtcgtcttaaggaaattgatacgatttcagatgttcagtcagccacagaagataatgatccaaaccaaggcttaaacaaacaaggaagttatacggcagcagtttatttctctgacaatgaagtgactaatccagttgctggtgctgatttagtagcaaaaggtacggatgcagggggatgcgtagaggtttataaaacggtagaagatgccaaaaaacgaaatgactatttaagtgctttcgatggccttccaactgtcattaaccctggttcacactatgtttatggaacggttgttattcgtgtcgcagcatcattaacggcatcacaacaaaatgctttgacgcaaaagatatatgagaagttaattgagattaaagatgatagcacaagcaaaaactcctcaaaaacggaaatcccatcctctacgaaaccatcatcatctagttcaagctctactcaagcaactgttagtgaatcagctcagagtaacaccaaaacggtagctggaagtgccccaacaacacctgcacaacaacaagatcctggagttaccgaatcatcaaaagaaacgatgttgaatcctgaatatcatagccatattgatgaaaatggttataattcactcttgggtgcctatgtcctagataataacaatgggggaaacaactctaatactactaccgagtcgtcagcaacagaaagttctgaataagttgcttataactctatactctattttaaaaagaattagaagactactgaaaacgccaattgcagctattggtgtttttttactatcaaagctattggcaacactgtatcacttgaaaacctcaccaaaatagtctatacttttgttagcttataaactaacaaaagaggtggcacatgggatattttgattattcaagagagccaagaagcgatatcgcttttatcgatatgaagtctttttatgctagcgtcgaatgtgttgagagaggactacatcctttaaagacttctttatgtgttatgagtagagctgataactctgcaggtcttatccttgcttcttcaccgatatttaagaaagtgtttggaaaatcaaatgttggaagagcatacgacctcccttttgatgttcaaacaagaaggttctcgtattacaatgccaagagacaaggactgagaacagatccagaatacgtgcgattcattgaagattgggcaaaagtgactttcatcgttcctcccagaatggacgaatatatctcagttaatatggaaattcaaggcatttttcaaaactatggtagtcctaacgatatttacccttattctatagacgagggttttattgacctgtctagttctcttaattacttcgtgccagaaaaacagttgtcacgaaaacaaaaactcgaccttatttctgcgaggatccagagagacatctggagacaaactggcatctattcaaccgttggtatgtccaacgctaaccccttacttgctaaacttgcccttgataatgaagcaaagaaaacaccaaccatgagagctaattggtcttatgaggacgtggagcagaaggtatggtctattccaaacatgacagatttctggggtatcggtaaaagaatggagaaacgcttcaacacgttaggtatctactcaatcaaagacttggcaaatgctaacccagatatcttgaagaaagaattaggagtaactggtcttcgattatggtttcatgctaatggtattgatgaaagtaacgttcataaaccctataaaccaaaatcaaaaggtctaggcaactcccaggttcttcctagagactattttagacaacgagatattgaaattgtccttagagagatggccgagcaagttgctatccgactgagaaagataggcaagaaagcgactgttgtttcaatacaccttggctactctaagcatgagaacaagcgttctatcaatacccaaatgaaaattgaaccaacgaataacaccgacatgctgacaaactatgtgttgaagttattccataataaatacacttcaggagcaatccgaagtgtagcggttaattattctgggtttgtagatgaatcttttggattaatctcactattcgatgatgtcgaacaaattgaaaaagaagaaaggcttcagacagcaatagattctatcagagaccaatttggctttacctctctactaaaagctaatgcactggatagtgcatcgaggagtattgccagaagtaggctcatcggaggacattctgctggaggattggatggtttaaaatgattgatcgttcttatttaccatttcaagcagcaagagaatatcaggaccctgggatgcagaagtggatggggttctttctgtccgagcatacctcatcattacatgctgctaaaaatcgtgttgacttctcaacagacctaagtaagcctcagaaactcttattactttctcaactctatgccaaccaacttaaagggcagttcactatcaaacatagagatagaaaagttactttattcggcgaagtgagagaactgtctcataaggaaatatcaataaagactagtgaagggtatagattagtccaactcgacaatattcttcaaattcagcttttggaaaatcacatatactaaaaaagcaacaacctatatttgtggttgttgcttttaaccatgaacaataatttattcatttttctccatttcggctaatgcggataagacaccatcctcatagccttcttcacgaccttctttaaagccttcatcatggcctttaatacatccagcattatatccttcttcgtaaccttcttcatagccttgagtatagccttctaagtatttgttattttctggcattgttcttttttcctttgtttttgtatacagaattgtattttatctgtacactattagtttataccatttggctctctaaaaaggagcattattacattgatattgtttcgtttctaataggttgactaaaatcaaccgtaatgatgttatcatctttatcaagaataacatcaggatctttatctgcctcattcaataggttttcagcatattcctttgctttagtttgcttggtggcttcaaattccttattacttttaaatttattccataaaactttagctaatgtttttgtaacataggcaccactacaaatgattgcacacattttcacggcatctttacgaccatcatcgtaaccatcatcgtaaattttctcaattaatttttctggaccaccatgaatacttgctatcttagctaatgctccataatcccattcctcatcaatttctttgaactcttttttaatttcattcattgtttatttctcctttatctttgttaagtatagtataaaggaaattatttatgttgtcgttcacagtttgtgaactttttttacagtttctaggaagtgtatagcatatgggttattaatcctagccaagtcataaattaatttataaccaatcaattgattagttgcaaagtcctcatcattatcgactaagtcacaaatataccttaaaacaaaaaagtaatcagcaaccttactgtatttttgagtttcctttagtaattcaatattaggtaaaaaaaactcattaattgctttcttaaatagaggtgtttttatctcattatcattgatgttgggtaaaacaacatccgtaatcagagcttttatatcctttttatttttatttttgttcgatttaaaatctttcatttggttactaaatttatcactaaaagtagtagaataacgaagaagcttgaggctcaagacatttactagaataactaaaaatgtatcactattttctttatattcagttaatgccttaccgtaagtatctgcaataaaatcaatatcaactgtttctttttcttcaagagaaccaaaaagtaatttttcatgttccttataagctttaagatattctggacagtaggtgtcatctaattcatatacagggaaaatttttatcatttcctgcaaaattctatctggattgtttataaatgcaactaaatcaggagaagtattagaaaaatctactgacaataaagaatctactgtaaccccatagcgcttagcaatactcttgagtatctcatcatcatttggttttcgagtaccactctcatactgagaaattgtactgtttcccacgtgtaatgcttctgccaaactttcctgtgtttctccgaaagacgatcttaataattttaaattacttgcaaaatagtccataatctaaatctccattttcttcctattagaattgctacaatatgatatgtacattacaatatgcatcgtgtatagcaatattgaagtgacaatcaattacaagtcacttagtgcttccttagttgtctctgcagctacgtgtgcatatacctctaccattgcagtccccttgtgtcccaattgttgagagactaggaggctgtcttttgtttgctcatatagacgtgtcgcaagtgtgtgtcgcagtttgtgaggagtagtgggtttaccataggcggtagatagcttcttcaccaaaagctcgacagaacgtgttccaagccttgcaggcactttattttgagtcgttaagaagaatgctttatctgaatcacttgctgagtaacgtcccttcctaatttctaaataacgctcgatataaggtacaccaaacggagctatatttacaacgtcctttttcccaccttttcgaataactgtaatcgtccttgtggctagattgacatcttgcatatctaggttgactaattcagataaacggactccagtagataatagaagtgctatgacagcaagatccctctctttatttttaacaaacgatacctgggcacgttttgagattttcttttcatgctcattgtcgatataatctaggaaagactgtgtatcgtttagaaagagtttttctttcatgttatctgcacgactagctaaggtatctttaggtttcttgattttcaccttaaccatgacatttcggtagaaataaggctcaccctcgtcgtcctcagtttcttgagtaagatacttaaacaaactagagagggcatctttagttcgaataatgctgacttcagatattgaacgacgctcagtattttcacgaagataaacaaagtagccttcgataacagactttggtaaatgggccagctcatcaatatgaacatcagcaatcgtatcatagtcggcataacgtacagtttcacccaatttctcatgatcgctaatcaaccattcaaaaaatcgtctatattcctttaaatactcatacagtgtcttgtagctatatggaataacgagctttgcttgataatattccttaacataccaaggcataatctcaagcaactcgtttatatttttcataagtgtttcttgtttcatattagcctcaaatctaacaattttcttgttagtagtagtttatcataactaatatgtgtattcaacaaatacttattttccgaatatatatttttcaagtgatatttacttatataaccatataattttggccccaaaaaattagacaatttatttaagcaaaggacttagttctgtattgcacaagactaagtcctttgctaccatttgtcaagtataatacggtttctaactcaacattatttctgaaagtgtatgaatggaattttctgaggaatagttcaagcagtttttctgacatttaagcatataaaaacgacaccttatctggtattttttgaaacaaggtgttagaactataaggcatagacgactttaatgactttgggctaaagtatagtcgtaaagtttattatgcattataagataatacattgtcctaattgtgaatacatttgtacagaatttttcttgcataaggagtcccacgtttggtggtatgttcttgacctaggaaatctgctaattcatagtgtctgagatcaataccgataaaagcactgttttgattagcagacttaaagcgacgaatgtctcctaattcgtcaataacgcttgtagccgttgtttctttgatctcaggaatacagagaagaatctcatatttaggtagagacttagctaactctaccaactgttctaaaacttgttcccgatggtttgtcaatcttataaattcctatacattatacttaacctcttctatcataggagaggtttttgaaatgatataataagattgctttgccagtccaactaacttctcagccaagttacctactctgttctctgaaatgcgtttagaggttgactgacgaatagtctctttcaactcaacttctgataattccagcacccaatgctttgttgggaatatggaactgttcgcattatgtggctctttgtcttgaatgattccttattttagtgatttcattttcaatactcgacgtctactctaaaggacttatcgacttaacaaggcgcctctactttaacataacgaaaaagtagtgaggaaatctcgtcggaactttcctcactactaatcttagtatgttttcagtgtttagagtgatgaaaatacatttcctaaagttgacaaagtgcaacttttatgagaagcgaaaaaggcaatcgacaatagcttcaatgaagccacatgtgattgcctctatacatcgtctcattcagacaatgtatacaccattacacataacaagctttacaattatacttctacccaatatcgataaggctgtctatgccgtattattgtaatgctttatcaaaaaaatcaccagataaggtgttggtttagtgttcactttttacactaaactttagttcaaaaaaaagaaaatttccttagtttgactatggaactcaaactatttttcatcaaatacattgatatacttgacaaatggtcgcaaaagatttaattctgtattgtacaggactgagcccttttagttttaccttaatgcgtttgttgttgtaataatcaatatagtctataatagcttgttccaattggctaagcgacttaaatgctctcacataaccattaaaacatttccgattttaaaattccaaagaaggattccatcattccattatctgggctgttccctttacgtgacatggatggttgaatccctttatcctttaaaaaatgataataataccggtgttgatattgccagccttgatcgctatggagaattgtatgttcgtaatggttctctgtgaaggcttgttccaacatcattttcacttgtgctaagttcggtgacgtagaaagattgtaagcaataatttcactgttaaaaccatctaaaactggtgataaatagagcttttggctacttgctggaatggcaaattccgtcacatctgtatagcacttttccattggtttagatcctttaaattgacgttgaataaggttatctgctttcttgccaatatctcctcggtatgaagagtatttacgttttcgacgaattctagcgattaaaccaagtactttcataagacgttgcaccttcttatgatttaccacaaaaccacgatttctcaatgtaagagtaatgcgacgatagccataatttcctttgtgttcagtaaaaatagcttgaatttcagctttgatagtttgattattatccgtttgatccagctgttttaagtggtaataataggtcgaacgagcaagcttaataatctttagaagaatctctaaagcaaactctgttaccaatcctcgaacaatttccgtttttcttcttgctctttctcgtccctcaatcggagttctctcaacttttttagaacagcgttctctgctctcaagtactcattttctgcttgaagtcgctctagctctgtcatctcttcaggtttcttctttggcttacgtcccattttaggcggtctccctcttgttttctcaacaatagtatacccatttttcttgtactgtgctatccaattgttaagcaaaccttgatttgagaggccatagtccaagcaaacactttgttgggaacaaccttcaagcagaactttatcaagcatttctcgttttaatttaggagaatagtaacgcttctttccctttttgacgatgtttattccataacggtcaattaatttcaccatgtactttagaccagaaacattcaccccaaattgatttgaaagtcgcttaaagctttctcagttcatatatttgaactttatcttcataagtcaatttcataataaaaacaccccaagttagattttttctgtctaaccttttgaggtgcagttcaataaaggctcttttcattttcttgtggttaattgcatgctcataacattttagaccaacttttagttatgaataaccttttggtcggacaggaagctgctctttatcaataattatattaaactgtacgataaaatttttattttcatcttgagcaatctctcttttaatcttaattggtatattatactcatacggatttgaatataagtctgtgtactttagctctaaatctcccgcttcttgaaattcagtactcaaaccattttgatttttaaaataccaatcaaaaataaattttagttctgtagtctttcctttcggaactgaaaggtaatttatgtttattatctcactttcattataagaagacataatacctttaggaataaattttatggtagacaaaattgctgactgtaatccaatattattaatgcttaatataaaagacgtatataatttacagatttcttgtttattcacttcagtatttatatctttatctaatttatttaactcactttttatgttagttttttcgagctctgctttctttctcgtttcctcatgttgtgtaaaattacttagtgcgtttgttttaacaaatctaactctcaaatcttctctcttggtatggtactcctcaagacgtttagatagtttatccttgaatttatctttgagattatttccaaatacgaaagaaccgatatcatgatagctatttctgttattttcagaatttaaattaattgaaaaggtaaaaataggtaagctactttccctcctttcttcttttgacttttcagtctcgtgttttaatgtccagtaaacacctaaaaccgtaactacacctcctataactgctccatagtagcctaaagtatctgcgttagcaaataatttattttcttcaaataatccgaaataccataaaccgaccggacatataaaaataaatataacagtaaaaatcaacactactactagtgagggaccgacatgcttttttattttcttagtaacatcatatttcttatttagtttgggtatagatattaccaaactaaataaaaaaaaggtgaaaattgataatccaccaatcacggccaaaattactactataatatttagagatatccttgttgtatcagaaattactaattctatcattttaaaattccttacaattctttcatctattcaaaaaagctgatttctcagcttttttaatcaatcatagagcttaattacttttgaattgcatcgcttcatcactctgcacaaattctcgttgagcatctgttaattcctcaagttcatcacagccaataagtccaaaagcctccataccatcttttgtacttacgatgtatgcctcaagttccctagctttgtcaacgtctgacactaagtaaatattttttttagtcattacttcatcggccatttttatctccttcaaccctttagtagtgtttaatcttcccccaatttatcatgttgggccctaaaggcgtataatggatcaaaatttgaatcaagtttattgtcgtcgtcagcttgttcagccatcttagcatttaaactattttccatcctcccaatacaatccattaccttccttatcattgtaagggtttcagaagtaattttcaagacctcgcttgaattttcattgtttttaattgtatctgagcttttcattttctgctttagacattcttcaatttcgtctaaacgtagctctttcatgctttgttgaggttctgcagtggctgatactggatctagaggttttatgttatcaaccgtcaagtcttcaatttttgtgacgttcataatgaccttagcacgtgcttcttcttttccattatgacctggtatatagatatagttgttgctaccaaaaaatgattgttgggtaatatcatttttagctaaacactcaaataaagaatcgtgtccctctactaaactgttagcaaaataaatatttctcgtgtctcgaaaaagttgggtattaaaaataaatggtctgttcttagggaaattattgacgtgaggagaatggaaaaaatgctctgttgataggtaatgtacgtaagggaccttactgagtagctgagacaaagtattcgtatccatctgagcttgctcatcaaagagaaagatgtctgtaatgtggcttgttggagacgtgactaactcaatacccttttttaaatagcccgctagcagaacggaatggtttttctcatcctctaggtctgcatgattgtgggtaatcgtaatcttagctttatcttctaaatacgatagagcattccaagaaatatgtgacttaaatcccataatagctactctatggtctttagattttgcaaagttagtcagcttatgaaaaaagggagaggcttcaaaaggagataggacgtaggtatcaatatagatattaagcatcagtatcaccttcttcttgatttaactcttctagttcagcgtctttgattagtggacgctcattaaacgcttcattcattctaaaaggcatgtatttggccacacgaccaccttcggttgtgttttgacttctgataacaactagagacttatcaatcccttcttctgcagcaagctctagattgaggaaaataatgttattaaggttcttatagccaccattttcaataagcatatatttgtcttcaatttcttgaatatcgtcaaaattatcaacgataatcaatagataacgtttgttgccttcttcatctaaaccatcctcgaaacgtccaaagtgtttaaagacgttgagcaatttatcaagatcactggtatcacctacgttagtgatataaggatacacatcaaaaagattctttgcaccgtcatcttcctttttattgagagctaactgaccgataaagagatatctaggaacatggaccgtatacgtacgctctttcttcttcgcctttttggcttgtaattctgattttcgtttctccataccagaaagaggacttgtactctcactcttttcttgtgtctttgtcactgtatacgtgaacttctccagttttgacgtaggaacaaaataggcatagttttgattaaatttaaagttctgataggcatctacgaccttccagtatcgaataggagagtagttatcttcttcccgaaggatatctttccatttataagtgaagtttctgctgatcttatttgctagtaagagtagcattgttccatgactgtaaatagagtaacttgtcgcaagagccccaggagtgtcttcacgttcgaactcccactcttgaattaagtaaaactctctgagccgtttgagatgcggtttgattttaggaatcggtaaaccaaactcccttgaaatttgaagtagttgaacatttcggaaagtagctataaatagtaggatatccatatctaactggtttagttgcttacttattaactcgtaatctgtttcttgactatagttgatttgaatgatgtaatcctcttgaagttgcaaatggaaaggaaagtcattgtttggataaacttgtttcagtaatggtgtcgaggcatacttcttataatagtcgtccgaaaatcgagagacagtattcaatgttgcttttccattgattgttcttaccccaaaacgacgtagtctttcattgaattttttaacgaagtcttgataggcttccagtgcttcagcagaaggcttttctcctgtttcagataatcgaactgtcccatcaggcatgagagtgacttcttccccattaaattttttcttcggataaagtgggaaattgattttcttagcaatattttgtaaccattttttattacctggtgttcttgtcatttgtctagtccttctcttcaattttttggaaccattatactaaacctcatataccttttttaacccagtgacacccacacacaaattagaactcaaaaccaagagccatattgatatacttctctaataatgtatacttgataaattgcaagaataagtgcaacatttactcgaactcttctattagggcttcacaagcagttctgtaaggtaaacattttcgtggtcggtgattgatatcatataacgccttgttcaaagcctcatcagagatagtcgctaaatctgttttctttgggaaattggcgtaccaagcctaaatcttccaagtgtttctttgggttgtcgaatttttcctttatggcgaaggacgctcaaatccagatcaatcaaaccagcatagagccagttataacaataaaacttattacgattaaacctctactccaaccagaaatcgagccttcactttgttaaacatgactcacttctttattagtgaaagccacatcatatcaagattagtttggagattttatcactggaaaaatatgattaactacaaattatggtatactaatgataataaattgttatcggtaggagaagtgaaaatgaacaaccagtatcttgaaaataattacaaaattaagttaattaagacatcatccgatactgactatattgattctgttaaaatttattcaagagttactccttcagacattagaacaaacacaaatgaactaacatattggttagataataaaactgtaggatttgagagctactttttttctctcttcctaaatgatacaaatattggcttagcaatgtgtacatacttaaagtccactaaaacagtcgtaattgagtatatagctgttgaagatgcatacagaaaaaataatacttaccttagctatttaaatgaactgagaatgtttatatcaagcttattagaggtcacatatttcatttgtgaaatcagtaataagaataacggagttgaagttgacgatgagagtaaaatatttaaaactattctatcaatagagaattttttcactatagatgctgattaccatacaccacctttagggattaataatgagttcagcagcttcgaagctaaattaatgattaattcaaatactaacataaagacgattcccaaagagacttatattagagttatccgatctttatattttgaatactatataaattggtatacaccgttttttagtgaaagtgaaagacttcgatacaataagcaaatccaaaatacttttgctagtattcaaaataaacttgaagagttacctgaaccactgcagtttattgaagttaataaggataaaatcaaaagtgcaggtggcgttgaaaagctacctgcacctaaaaagaaactaaacaataatttaacatctatatttatatcaatattcgtttttccaattattgtcattgcgtattataaagtatttaatttctttggaattgatacaactacaaactttaccccaataattggtggaatttctagcataatcgttagcatactcccatttttactaaaaaaagatactgtctagtgaattttagtacatttcaaaattatattgctagaacagttgcggattcctggaaaaaatctaacaatcttatctagtccagtgaactttgctgcaagatcgtagttattcgttattctaaggatgatagaacttattatatggaactgatatttggtatcaatttgaaacccctgagattttaatatattttcaatatactttatcgaaaatatccaattactatgcctagtctttaaataatccgtttctataattgaaacggattttttgtatttattacttccgaaatactcaaaactatcactaggttcaaactctaaatacaaagttcctttaacttttaacacacgttcaaattcactgattactttgttagcatcacaataatttattacagaacctacacaaacaatatgattaaagtaattatctctcataggaatattctcaatatttccgataattttgtcagaaattctacataaggttttctcagctatatccatatggattgtatgacccgataaaccatatgtattgcccccagaaccagcatttagaataatatcatcattattaaaagagcaattattctttaaaaataattcaatagatttatttgtatatcgataccagttatcataccaaatggcttcgtgttcattataaaacttttctatttcaactaaatctagcttttcattcactacacttctcctaccgataacaatttattatcactatacgaagcactcaaataggtttataatagcatgattattgataaaggagatttttatggattataaacttatttctacttacttagattattgcaaaactcataagcgtttgagttcacacacgattcgcgcttataagaatgatcttatgcaattttataactcagactatgataatgtcgaatcctatatagaacagttgacacgatctaacataaaaacgaatacattaagaagaaaaattgcttgtatgaaggtgttttataactatctaaaataccagaacataattgaagagaatcccttcaatcaattgcactttcaatttagaactgaaaaagtattgcctaaaacgattccgtatgacattctgaaaagcatttttatatatttagaacggaaagtaattgtatctaaaactgactatcaaaaacaacacgctgaaagaaatctactaattatttcccttttactttcaacaggtatcagaatttctgaactttgtcacattcacctcaaagatattaatctttccaataagacactccatattataggaaaaggtaagaaagagcgtatcctatttttaggagatcaaacaaccttcaatttattagaaacatatataaataaaaacggaaaggaatctaatgatttcctattcccagggaaacattcgcctaaaccattgtcagagcaaagtgtacgtttaattttaaagagaatcgttgaacaaaatagcttatctaaaactattacaccacatatgtttagacatagctttgcaacaatgcttctagataatgatgtagatattcgatacattcaacaaattcttggacacagttctatatcagtcacacaaatctatactcacgtatctcattcaaaacaaaaagaaatacttagttcttttaatcctatgtcagtgattcattctgaaatcgagtaagagacattccaggaggttacagtttacttcatcttaaattaatgtttgtagttcgacttcagttaatagattttatactcaacaaaagcaaaaatcatacaaaactccactttgaatcagcagttatactagattccgtattaagaactccataattgtttttctaaaatataactttcaaatatccttaaatattgatgaggaaaaactcaagctctgaagaaaatggagtaaatcttcctacaagaaaacgcatagtatcaagtttcaatacctaatactatgcgtttttctgattttaaagactttttttatcctaaatagactatattttaaaattcgtgttctaaccaccatttcgattggttaaatctttcaatctttcttccccagatttaagcatctctttctcaacttgattccattctccaaatagtaaatcatgaagaacggttgctgctgaagttgtattttcttttgaatcatatacacaacttctatctcgttgataaatttgaattctttcaaagatagatagttcttccaattgtcgtgtattatcaactagatgatttacaatgaaatcatgatgttcttttggagttgcgcgtgcttgatttggattgatagcgtacagttcttcgtatcggataagggtgcttagataggacaattcgggctttgttgcgattatggctaattgtacttcatatcccttatttttcaagagttgtgccgttttctttggaatatcaactgttcgtagagttccctctatcaaaagattgtatcccaaactactcaattttgttactaaagactctaccattttccctgcaaaatctttggtgtattcaacgctatctttgccatattcttgctgaagttctaaatagtgtggatgctgagagcgaaaactatcgccatctatgataacaatatttccttgaaattctttctgtttaatacgatgaattgtagtcttgccagcaccactttgccctccaagcaaaatcgctataggttgcttactggacttttttcctcttgtcagagaacgaagattccgtgctaaagcatgtttgaattcgctatcagtataatcttggatttccattaggctaccatccgtttttcagatatctctaacatgcgttcaattccatccaaatagccgctatatctctctatttcatcaaaagtttctactaaatagatattcgtatgaatcaagtcagatagatcatcactcattaaaatccaaggattagattcttcatcaatgctaattccctgtctatcttgataacgatagagtcgagatagtagattagcacccctttctttcacaatttcaatttttaaagtcaattcataatcttcaacaggattgagcattttgtcttctcctacaatatcgacataagatacattaaatttctgacaaatgatgtctattaattcggttgagactgaactcgttccattttcataacgactcagactatttcgtgaaatacctacaatccgtgcaaattcgggttgtgttaagtcatgtgttttacgtaaggattttatgttctttccaatcatggcaaactcctttatttttataattcaattatagcataaaaaagcattacgcaccaattttggtgcgtaattggctttttttcttaaatctctctagattcttctccaattgttccttatgaagttgattcttagcttcctttaatgtgtcgtccagagtttcttctctgtaagttgattctgtttttatttgttctgattcttgttctggagtgaaaatgatatctaacagtctgtcaattttttcaagattttggacgggcatatcagatagtctatgaattagcttcttgaatatatcactattgtcttgattcttcttaaaaaatgttgtaaacatctataacctctcaaaaaaagcagtctctttggactgctcagtgtaattctgaaatcgcatcataaattgactgtaatttcttattatctttattctttgtgtcaatcaaagtatgtagctcttcaattttcttttgactactttgaatatcgctattattatctgcaataagtcttttaagatgttgctgataactggtagtgatatctgtctcttttcctgttctaacctctgtaactttgggtttagaactaaaatttgattccgtcacaggtgcttgtttgcgcttttgaaaagctgcttcataatttacatcattacccccttgatgatttccaaataaggccgcaattttatctggatcttcttgattttctgatttactttctaatggttgattaaaattccaatcttttgtcattcactcatttcatcctttctaaattcagaatcatcgaattgtctttctttaccaaaggcatggtcaagagcttcttcaaaactcatgtgactgatgctttgacgccttttgaacgtcgcaaacatcgctgtctccagttgttctttgtaagcagctagtttttctgtctctcttgctaccttgctttcttgcctagtgaccttttcttctaagcgtttgattatggtcatatatgatcctccttcattctgatattagctaaaacatcttgattttgttatcacaattctaaacattgagaggtttgtcttactggtggatttccaaaagtctctttcacagtctcaagcataaattgtaaatctgatttcttttcactaagaatatcgttccagtctattttttctttcctagactcattattaggtaaatccagtaaaacaggcaatcctgattgagataacttatcagaaaaagcttttcctgcatcatcacaatctaccgccaatatcagtaaaacaggatgattatcaaaataggtagtggtatcacgaattgtattgaacaaaggcaataactttgaaggtgttactgtatctaagaattccaacttctgattttcttcagctatcagtcgtaaagtttgataagccacaacagacctttttaatccctccatagataccaaacgaacatctgataaactttgtttgtgcagctcgtaataactcattaagtcgatgaacgattcacaaaagaccagtctatttggtttaccaatgtcaaaggagattccaacatgtccatggcttccttttagaattgtttttaacctctctctaggaagagagtgattcttataaataccttgtaagcttgctgcctgcagcttgtgacgatgatcaaagcttttaaaaacaataacaggttcaacagtttcatttgttttccaactggcttgtgccatcaaaccttcttgtatcatcttttctatgatttcttctgagattcctctacattttgttaagtaatatcttgccagactacagttagaatcttctactctctttaaaggataataaaatagtctctctcttttttcttgaacagcttctttttgaaaaggttcttcagaaagaaaagctagagcttctttaaaagaaattcccttaacaagtcgaacaaaatcaatgacatcaccttgaatatctcttgaaaaccatttaaaagtattggtagttgaaaaaatccgaaatgaatcatgttcaggatgttcatagacactgctagaaacttgtttaaaggagatacctaaacgacttgctacatcaagaattgaaatttgcttacattcttctatttccatgcaatatcatcattttgtcgtagtatttggcagtgatggtattgaggatgattcttctaaagttttaggagtggccttatctaaatcatccaacccagatttccaaacctgtacttgattgaccaataacttacctggtagtttcgaataagacaacttaaccgttctggtttctgtctgattggtctttgattggttggcattctttaaatcagatacataggttacattataagagaccatggcaatggcttgattcgtagtctgattgacaaagatatcagctttttcaaaatgataatccaaaatccttatacacttggttcatggcatcattttgacttgtcaattcttgagaataagccgattcagtcatataaggttgaatacgtgtattattttctccgagcttttctttcgtatagtactgagtcaaaaattcttttacagtatccgatgacaaaatacttgctttatcttctgcttgtttgtcctctacaagtttagctgcagccaattcgatttctttgcgactttgtttagcagtagaatgttgaccagcagtatatcccatcatgagaataaaactagttgcagccactgctccaacactaattaaggctttagttttgagtttatttaacatcttagaccttctttctaaaaaaactaggtcaagaatagcagataaatcttgaaaaaagtatcacagagccgtaaaaatgccacccgaaggtggccaatataacttacaaaattagtaatccgtctgataaagttttttatacaaaccatttttcatattcaatagttctgtatgacttccttgttctacaatttctcctttatccattacaaaaatctggttagaatcgataatggtagaaagtcgatgtgcaataacaataattgtaatattttgttctttaaatttctgcataatctctttttcattaacattatctagataacttgtggcttcatctaaaagtattattttaggtttcttaactagcgctcttgctaaaattattctctgacgttgccctcctgacagattcattcccatttctgaaactaaagtattataccccatgggcatttccataatttcatcatggatattaactaacttacaaatttttgtcatttcttcctctgagactgagatatctccagcaatattctcatgtatggttttattaaataaagtcatgtcttgtgggacaatgccaatttgttgacgaagatactgtttatccaacaaattataatctaagtcatcaaataaaatactacctgaggatgctggaaataaacctatcaataatttggaaagggtacttttacctgatccagaagagccaacaattgctaccttttcccctttctttatttcaatagacacattagagagtacttttttactatctctagtatatgaaaatgaaacatttttaagtgcgatttccccatttaagtcgtgtttcactacaccatttatttcagtttcttcatctaaaatctctaaaatccgagataaaaatgttttgctattgtagaatgctacaatcgtatcaaaaatactattaatcttaccaaataatagagatgacaaagaatatactgcaaaaattccacctaacttattacctaaatgattatctggcaacaacataataaataataggataaatggagatataaaagtgataattgaaaataacgaattaacaacacttgagaacaattcactggctctatatctataaagatacttatctaaataacctttccattgtttaaacgttcgaacttcaaatccttccatttttattcccatcatagaataaatcatttcgatttgtttattttggagatcattctgagctatcacaaaagatttacttttttgttccaaattctttctagtcaatagaagcaacaacaaatttattaccactaacataagagcgataatcgccacgaaaaaatcaatatatagaaagtaaaacaaaatacaaattacaaaaccaatatctaatattcctagtacaacctgatttgtaaataattgccgaattctacccaaaccatttatagaataaattaaatcaccactacttctagtagagaaaaatttatatggtaattgaaataaacgaccaattacactattattcagtcttttatctatatcgtttgtcagattaatagaaagatatctctgaccgagcattataataaagtatagtaatgtaaaaataataaaattgagcgctaaaattgctggattaaactgattaccacctgttgcttgatttaatagctgttgcgtccatataggtagaataaagctaaccgcataacttacaaaagttagaaataacagaggtacaaaatattgccaagattgccaaagttgcgcataaatctctccgtaattctcttttgatttttgttttattactctatcactgctagaaatactaattaaaaattctgagaaaccggctgagaactcatttaaatcatatcttaattttccgagttcaggatcaattacccaaacaaatttagaagttactttttctacaacaacaaaatgcttactctcccacaatgcaatggctggaacttttatctgtttatatacatctggtctatcttttggaaaacggaatgatttcactttaaatcccatattttctaacagttcaattaaattttgaaaactagttccatccctccctgtttcttttagatttctcagatctttaacggaaatttcgtgattataaaaactcgacaccatcgcaacacagcataatccacactctgttttttggtgttgttcgataaacgggatgtttcttttcatatctaacccccattaatttaaaagtagtatatcatttaatctagtcctactttttctatcattagccatcaatattcccatttctcctgtcaaaatcccccaatcatcacattcataagtttctttatccaaaagatatgaactactttcagtagctattctattttctatatcaacagaatagcctaaaatagaatctaaaatgactaggttcccgatacttccatgacagattgaattatctaaagtagaatcttgatttaaaattttattggaataatcttgaacttcggtctttaaaaatttgtcaggaaattcattagtttctaaatagttcttggcattaactattcccacaataccattacaccatgaataatacttgacattatttcttaaaggaaaacaattttttccacatagtaacgaacgttctttgtcaagatattcttttatacaagaaataatggaagtttttgcatcagatttgcatgtgttagataaagaatatctataaagttgcgtaataatgccataattaccatgagcatatccaggatcattttcaatccaaaatccatcttttttatatttttctagtattttttgaactacaccttcagacaatttctgagtcaactcagttacccgagaactatcgagcattgttttctggatttttatcagtactcctaaaattcctgctaaaccacctattatatctaaattgtcaatatttcgtagatgtctaaatgttgatgacaatgtttcatatataatctcttcgatatcttcaacaaatggagtaccttcttctctcaacacacacaatgtatataagtatccatatacaccagtaaaagcacctaactggtgtacagggaaattcccttgtaattcttttatatagttattggtataattgataaccccaggtaaaagcgtccgtaatctagtatcatctatgcttgttattcctaaaatcataccagaagttccactatatagactataatccattggatatatctcataatttttattcatagccaccatcgataaccaactaatctcagtattaaattcaaatttagctgatgaaattcgattgattatatttgaagtaatagtctcagtattcgtgtgttcttcagatatcctagatttctttggaaataactcgctccccataaaagccatatttataattcgtttttgtctgagtaaattatcatctgataaactagttattctatttaaaactttattaacaatactatgtccgtctaaagaacaaatatatcgacctagtccattacgaatttcattgctacttgtattcgcataaaatattggaatatcaccttttctaaactgacaaacctcatctttcatcataacattatcaaagaaattagcaacatcaccatattcaaacaaacgaagcaaatacatttcaaaatcatatttattttttaacaattctgggtggtgacttgtttcaagaaattgtgcataaacattggtatttcgataaatatatctcgtctcacaattctcaaaatatttaacgatcatcctagaaactatatctctattttgtaaaacaactttgtaaatagtttcaaatcctctttgaacctcgttgagataattagaacacgatacgttattccctttatatcttactgtgctagggaaatccccgaccattttaaatactttttcaattctaatttcatcagtcccaacattagccagttgatgggataaataaggtgattctcgtctttcgcctgaatttaatgctccaatttccattcctttgtcattattcgctgaataaagactcattggtaatattcccacactataaactgagttagttacaaaattataaatattttgtgaattggaagtgatatttacaggttcactaaaatgcaatatcgtctcattatcaataagataagggtattcttgacaagctaaaatattttcaccatgataatctttagcaccaaaaatatgtaaaaatgctaaaagttttcccatgtttgtataataagcttctacctcctgaagtgaattgcattctttttcttctataaattctacaaagctataagaatctttactcaatgttttagggacgaataatgattctgaaagtccaaaacgatgagcaaattctttagaaaataagctcaaattaacatcaatagacatattccttggtttgtaaaccagctttttcttagtatttaatctaagaatacagacgcttttaccattagagtgagtatcacctgcattaaaatcaatacttgataattttaaatccttataattaaaataactttctaaatctagtagattctcttcaaaattaaggataatttgttcaatatagtccaagatgttagaaatctttttatctaataactcaaacaaaacgggatactttttataaaactccaggatgtaatctctatcctttaataaagtattgataaaataattatatctctttttactgtcttcaccttttaaacgagacgctctccttaaatcattaatctctaaaacaaccgttctgtagctcatattcatacaaatttcaaaaaatactgattcaatatctagaataaattcatttgtattagttatacattgcgctttatttaaaaagctagttaatcgctctaagtatttaaagcaaattggtttaaataaatctagccaatgaatacttactctgagtttttcctgagggttatattcatcatataagattgttcctaactctcgctcaatataatcttttccccactgctcgtactgaagaaatttttcttcccaatcttgtagactatctccagaggtagtctttaaaaattcatctaactgctcatcatcttcgatattattaaataaacttaaccatttttcagacaccatagacataatgatttcctccttaattactaatagattatcaaatttaccgtttattagaatgagtaatatgtgcaatttttgtaaataaattaaaaaagctgcatcttctgcaactttttaatctggtggaaaatagcccaactgctcagcgatatgaatcgcctcctgcctgttagtcactccaaattttgaaaagatattggccaagtgattggaaactgtacgtttactcacatcgaccttgtcacagacatcatcaatggtcaagccatttctaaccaattctagtatctcgatttctcgtggtgttagcacctctaccatcacttcatctgaaaagaccttaccacctagataaatcttttccagttttttcaccaactcatctgggttcatgcttttatccagaaaaccataagcccccatagctttagctcggtgttcatacatctttttgctgtatcccgtcaaaattacaaccttactagagcaaccattgtcgataatctcttgtgccaaggtcagcccatcatcttgatacagactcgtcaggttgatgtcaatcaaaataatgtcgtagtcattaaaagcaatcttcgaaatagtcgaaaaattatccactaactggacctttttaatgttttccgataactctaaaatcatcttgatactttggctaaataatttatgatcatcaattaacaaaattttcataacacaactccttatcaatcgggagagaaatttctacacgaaatctcttattattttcaaaaatctgcatctgaccacctaaaacactaattttattagacatatttttcaagccataacctaaggatttttctgtttgaaggcagtcattttcagaaatgataaaaatagcgtcatcatgcacatcaatcttcaaagaaatcgttccaccactagcgtacttaacggcattggtcgccaactcctcaaccagacgataggcaattttatcgtaaggagataaaagcctaaagtggtcaggaaactgtgtgacgacttcattttctgcgtgatagcgcttgacaatccgattaatcagcccttgatactggatgtctaactgctcgtctgtttctaccattggctgataataatccatccgctcacgaatccgctgaaccaactcctctgtcaccagattgatctgttcaccaaaagcttgattgctactatattgattgaaattttttatcgccatcacattttgcaggatttcattgtgaagaaattcggagaactgttgttctgtgtcttcatttgccagcagacttttcaccatacgattacgctttaaaaagagaacttttacataatccctagcatctagcatttcagcagaacgaaagaggcgaatcaattcttccgaacaaatcccgaacaatagtaacatgatattcaagaccaaaaagctcgtgtttaagtctagacgaaaaatgatgaaaatacctactaacaaaaatataactagtaaaaacaagtgtgaaaaagcttttatataggacaatttcaactctgatacctttttttgaagagagctgacaatcgttttgaagtgtacaaaagctaagataccaagaatttctagataccagactaggttcatcactcctgagcccatcgtattgatatacaaaaagaaataagaaagaggcaatatcaaagctaatatccacaaatttcgtctctgatacttgagcttgcttttcaactctttatgatataaaatcagtaaaatcaagggaacaaggtttaaaaagaaagacgcaaacaaggacagaaatagaaaaattgaaggacttaacagatacgaactaatggtgattagtgtcaacacaaaggacacactcaacagttcttctcctattttctctcccagaaagataatagacagagaactatacaccaataaaaaagagttgagcggatgaagaatatcaaaaaagtacaacagggtgctcgcaactccttgattaaatatggattgccagctaatgagaaacatcatcaggagcaaccaaagtttcaactcactataccgaaaggtcacaatattacaaatatagctaaatacaattaaggcaataatcagcaataaaaccatctgtaaggaaaaatctgtcgaaaaatccagaggaatcctataataaatataaatcatcaaagttagatgattaaaaatcgtcaaccaccacaataaaagtgagtttttcgatatcaatttgacaaactgtttcataagtatccacttcctgaactactttaatatcagtataacacaataccagaattgtcggataggcaactctggtatttgacttatttttcaataatttgccaacttactctgtaagtcactagcaggtaaaggacaaagagtaaaaccgctactcccagataggtgatatcaatagaaatgctggtattagcgaaattctcaaaatagcccaaaagagctgtactcaaggcaagtgctagcggaccagcgataaccagcggaaccaagaaataacttagaatctgttgcaaaagaatagagcgattttgctttctcttattcccaagaaggtataagatttgataatcattgacactttccaaagaacttgtagaagtttgaagtgacaagatactgagggaaataatgataaaaataacactgacaaaaatcatgacaaagacgatgacgcccataaatccaagataaatctcaaaaattcttcctttcgtttgataggtgaacggattcaactctgctccatcacgagtgaagtagtatttttctatccactgacttaagaatgtttctactttccgtttgtcgatattttctttgaaattggcaacataggtcgtgtggtcttccatcaatccaactactaccttatctggtacaattaaggttcctgtgtcatttgtacccactgacgataaaaagtaaactgtttcaagtggctttgaagacgcaagattaagagaataaccgttaatcatgagggtttttgtcgttaatagaaagtcctgaatctgcttggcagttcctttatagttagcattgaccagaaattggttatctgccaagtcaacctctctttcaccttgcagtttgcggagatgattgtaggcagaaattcctaaaatcggtacttttgatttaggaagttccttatcatgcgcccagagattgctagtatcaatcaaatctttataggttaaatcactagaatagataggatagctgtactcctctttgaagaggttaaagtcaaatccatctgctttcaatctgtctttgacagattcctgagaaaactggaactcttgaccacgataaagattgacagatacgtcataaggtgagtatttgttcagctctcggttcatagtcgtataggcactaccactaaaaactagtaagctgagagccagtgtcaaggtcaaggataagacagccaacgtgaccgaattactatcagcttgttttgaaaattgacgaattttaaaactgtttagtttgttatagtaggtttgaggcagttttctaagggaaaccaagataaaatggctcaaggtattgtaaaataaaatcacaaaaatcacgaagacagatactagcaagataccccaacttttcaagagtgatagatggtgatagtctgaaaaatagaaagcaccaaaaccgataacagctgtcgaaagaataaagagaagtgcttgaagaactggcttgccttttgccaagacagatttcttgaccccattttcttgaatgagtgcaatgatattctgctttctaaaggtaagaatgtccatgacaccaacaataaaactggttaccaaataggaataaactagtaagatgacagacttgctatcaaagaaaagcagactaccaaagtaattggccataaaaaactcagatgcaatcttagctagaatgaccagtaagatcactccaagcaagaaacctagaatcaaggaaaagatattgaccagcatggtttcaaagaacagggtacggataatctgcctcttcttcattcccagcgttgcataaagtcccagctctttcttgcgccgtcccaggacaaagtttgtggaataaacgacgagaaaggcaatcgccgatagaatcagataggaaagcaagcccatgtactggctcatcaccgtcgttaacatttcctttgctcctgataaactttgcatcactggatggctaggtaaagcattaaaagcgtagagcaagctataaatcaaggtcagactgaaaaaatagatggtataggtctgtaaatttcgaaatacatttcgtaaaatcaattttggatacatactctcctcctcctatctggtacggctgtaaatctcttgcaaatactgttcattagataagctgttacgttccaaatcatccataatctttccatcgctaagtagcaccatccgtgaagagtacttggctgcggcagggtcatgcgtaaccagtaaaatggtaataccaaaacttttattgatttcctgcaaaagtaccatcagtttttcagaattggcagagtccaaggctcctgtcggctcatctgcgataatcagtttagaatcatcaatcaaggctctagcagttgccacgcgttgccgctgaccacctgataactgattaggaaacttatcttttaagttttggatggccaacttatccaaaatttcctcaatcttatcctgatgttttttgatagttttcccctgaatttgaagaggtagaacaatattttcataaactgtcaaggtttccaccaagttgtaagcttggaaaatataggaaatgtttttagcacgatagtcagctagttcattttccttggcatggatgatgtcaaaatcttcaaatcgaatctcacctgatgttggtttatcaatcgttgaaatacagttgagaagtgttgtttttccactaccactagcccccataattgccagaaattcacctttttcaacggacaagttcacatctaataaagcatgaacgatattatccccttgaccaaatgttttcgttaagcctgtcacattaagctgtttcatcatttcattcctccgtttcttttttacactctcattatacggtttctttcaaggtttgccatgagtattttgtgcaatatatttatgctataaaaaaagccgatactttttaggtatcggtcgatattgattattttcgattgtttctttttttcataaagtaaacaatccctatgacaataactcctaagaccagtacaggtgcatagaagtctagtgttccaataatcccttccattttatcctcctgtcaaagaatagaggtggttttatccacagcgcacgtttggcgaagtacattcataagaatgtgtaaaccaccaaccacagcgaccctgtactgttaatctaacagccgtactccacccagcagcagatttaccattcaactcttggctattaatttcataatccaaagaatcaatctcaaagttatcttgtttcatttgtatttatcctcgtaaatataacactaaatcaaagtgttgtcaatgttttgtaataaaatactagaattttccttttgttttatctaacaatgaacattatttgtcgtacactcataggaacaggtgaaacacaatccacagcgacctgctagtgtcattttaaaagctgtgtaccaccagccagatcctgaggtaccattgagttcctgattgtcaatttcaaattcaagcgtatcaatctcagtatttacttttttacttttcataattttactccgtaaatttctttcattccgttcatattttccgtaaacctgtatatagtccttcagtctactctcaaaccaaaggactataacaagtttcaaattgaaaaatgaatcctatagaaacaaatctacatcaaactttttagtggtgagaaaaactagccacacttcacattgttcgttgtgcattcataagatcctgtaaaccaacgtccacaacgtcccgccaatgtaagttgaacagctgtaaaccaaccagaacctgatttaccagaaagctcttggttttttacttcaaaatcaagtgtatcaatttctttacgattgttattttttctcattttcttctactcctactcactatggtttaaacctagttctatactctccaaagaaaatgaaaatttaagtaaaagaatcattaaaaacagtttaatttctacaaagttatattaacttaaaatttcattttcaaattgatgagcatcgaaatctaggctatccgcatttcacattgttcgttgtgcattcgaaagaacctgtgaaccaacgtccacaacgtcccgccaatgtaagttgaacagctgtaaaccaaccagaacctgatttcccggaaagttcttggttttcaacctcgaaacttagagaatcaatctctggacgacttgtatttttagccataaggttgcctccttccttcttttagatgatcatctttacagtaactagtataaactctagtattggctaagtaatgagtaaatcgtgcaagtttcttattttcgagaaaaatttttatagtgcccaaaaaaaaacctgccaaattaatttttggtagggtttttggtaggaaactaaattaatttatcagtttctaaaatgtgttcacgattctaaaaggctgatactatagtattccgaattctatttggtatatgcctcttatttaagactaattatatctcccgcatttgctaataacagtaaagtgcttcttcagaaaaacttatattaaattcgtattaagcatatagtaaacatattaagactagtagtgaagaaatttccgacgggagagagtactcactactttttctttatgttaaagtagtggtgtcttgtaaagtcgtaggaatctatggtactagacgtcgagtattgaaaatgaaatcactaaaacatggaattattcaagacaaaagaggtaatgtcatgcgtgcagtatttggaattgatgtaagtaaaacaagttctgaggtggcaattttagtcaactgttagaaggttcatggctacaccatactcaatgatgccactggattcaatagcctgttgggtgacttaaaaactgttcataatcctgagattatatttgagactacaggcttctattctcgacgtcttcaagcctttcttgaggaatatagttacgcttacactcagctaaatccgctggaagctaagaagtaattgaatagtttgtgagttcgtaaagcagataaaattgacgctgaaaagttggctaattcttagcttgtgcacaatcgtaaaccaacttacgtgcagcaagaagtttatcaacacctacgtgatttaagccgtttctatcaaaatatgaatgaagatcttgttcgagctaaaaatcgtctgcacaaggttctacaaatcacttttcctgaattggagaatctattatccacacctacttgagagcaatattggaacttagtgatggcttttccatgcaaagagtttgtattaagcatatctctaagtgacttgtgtgagattatccagcaatctacctcaaaacgtatctcttaaaagagtattgcttacctgactgataaacttttaaaactcgctaaacaatctttttgtgcaatcaagaaaacctctccaatgcttgaagaggttcgttcctattctcaagaattacttcgtctttctgaacgcagacaagttgtcttaaacgacatggtagctctagctcagcctttaccagagcatgacatcttacggtcaattcctgacatcgcagaaaccacagtgaaatctaacataggcgaattgggaaatattcgttgctttcagtctaccaattcatgcaatattgctgacttttatgagaaacgaaaaagacaatacctttaacaaatcctcatgcagttccatcaatacatcgtctcattcagacaatgttttacctcaagtacctaacctttatcatccctgctaaaaaaacgatcaagtttgactatccatttaattgtatctccttataaatagggtctcgtttttttgagtgattaatttctaagttactatgaagaatatagcattagctttaaacaccccttcacataatattttgtgtctaaaaagtattgatttgtcttaggcctgaaaagtacttaaaattatatcccttcccctttattcattctaaatactatttaaatactacactttctgagttgtataatagtttaccgctagagaaacgaagttgagaactccttaaaaatcttttttcaatcacttcatctactgcagcatcgtcaaaatggatgacttctccgacttttttcaaacatccagcttcacttgaatcaagtaagctaaagattttcgctagatctggaacttctccgacaccagcgtatttaaacaattcggctagaggaatgtaattagttagcgtcttaagtggtaaattcttaacatattccctacaacctttcatgaaggctaatttttttacttcattttgttgacgactatttgtcaaactagaaatccttacttggacttcttttgaagctaggttattttgtcccgcaagcaacatatcaaatagcatatattgatagtacgttgatatcacatctttagctatggctttagcttcagtctctggttttccctcttcgattagctttctccagagtttatcagaaatatctctagttgcctgataaaaccatggtgatccaaacttcttatatcgagtaattgcaaatggtccttctgaatcaagcatatactcaataatggttcggcataggtcatcattaaatttataaataaatgattctaacttttcttctaggtcttctaaagtaattatctttggattattggctgctgttgtcattgtcctactcttattttcaatcaaaaaaattggtatttacttcgttacacttgattagtaattaatattatcttgttcctaaaatatcgtcagtagatacaccaaaatactcggctatagctataacgttttccatacgtatattagctccattctcccacttgtcaatagtccctgcatcgacatctaggtcatgagctaaggttttctttgacaatttccgtcgttgtctcaagtccgaaataatatttcccatgtatatataacctgcctaatcaatatagtcctgaaatgattttactatttttatggcaaacaatcaagaaaagttcataataaaattacacctaactcatatttttttaattaaaaagctatgattttctactaaaacatggatttgttttaattataacttagcgttaaattagtaattatttcattttcattcagtttgcaaccgtcttatatagatattttatacagtctataaagtcttttgaatactgttatttctacatttgtttattgtttctaaaactgctataatgattttgattataaaaaattataatttttttaggaagatgttatagggataatacatgaaagagtgtaaagatagtaataatttaatgggggaaatgtttactgaccgattaattaaactccgacaagctagaggttggactaaaaaggaatttagtgccaaaatagggaaaacacaacaaaccgttggaaagtgggaaaacggaagtaatgcccctacattcaaagatcttgtgaagttagttggattatttggggtgacgtcagactacttactaggattatcggactcaccaagcaagtacgcttacccaccaattaatgacaataagcaagagcaagtagaggaaatgtttaaggaacttgatgaaggaaaccaagatgcgactgttgatttcatagaaaatcgattagataatcagcacatctctaaagaaatcaaagaaaacgaccttaaaaaacaaataggcattaacgaggaacgaccaacaaaaagggtcagtatttatgctagagtcgatgcacaaggctttgaattatcagaagtcccagttgactgtcttgactaccctgtgcctataccagtacatgatatagcacttaaggttgtcggtaattccatggaacctatttttttcgatgatgaagtgatatttgttatgaagaactctatcctccgaacaggtgatatcgctattatacggttagatagtcggtactgcgtaatgaaggtatgtaaaaatagcgaaaatggtgacattattcttaactcgctaaatactgatgagacagctatcactcttaccaagaagaaaagctgcactatctttggtaaagttgtcctaatgtaagtttggtctttaaatagtaaagaagtataagtaaaactttataatccatataatagcgaatacaagagaaaacggcaaccccaatagagttgccgttttctgcagtacataacttacagaaataaaagaaagtaacttcattatactttctttctgctaaaatctcaatagttgcaaaatatatcttaacttaaccttcagctatttttttaagcaatatgaatctcaaaataataaggagaaacgtaaattgacttagatcagtgattttgataaaattgtgttagaaaaaagaagttgaggagtcactcaacttccatgtaaagccgttaaaaagacggtggctagtttaaacgaagataatccgtcttacttcgccaaaagtggggacggattattttttgtcatcgtctttaaagagtttgtagcataaacctattagaacgatggtaaaactacctaagcctaggatggtttgcacaatctcaaacgctgtcaaaatgactctcctttctactagattttgaatgcttgcccataggcatcactcctctctaatgaatgaaagccaccgtctatcacttttctgcataaaagagtatatcaaatccatatgataaatctatatataatagtttagctccttccattgcgaaaaagagctaatatttttattttcaaatagactttcaacttgataaaacattaatcgaaaaagttacttttcatccttcaaaaatttattttaaacatagaagtatcacgctagccacaactttcccgctaaaattgttcacaaagtaacaattgtcattacccctgtgctcccgcacctcaagcaaaaacgcaagagaaactcttacgtttttgttgcattaatattccacagtttacttatctatcttgggagatggtacatagataaactatctaagaagtaatatagcacaatataatctaaatggcaatcgtcatataatctaattctattgttttctcatttacaaagtaattatttagccacataaatctaattatcaattcgtcatcaaaatctaaaatattattagattactaattatgaacatctttgagttgaggtatccttaattacaatttaactagtcatagattaaaatgaggtttaccaaatgtccaatttttgtttttaaatctattatacaagtaattattctgaaatagagtgaagggcttgtttgaaatgacaaagtagtttgccgtattaatggttgcttgatttaaatactcaatattgtctggtgtcaatctcactaacatcgtctgagcttcatcaattgaattatctgtaaactcaatagctaaaaatggagatataggcaaaatcattcgtttccacatatcagtaccaataactggattgtcactcgttaataagttttcataactaatcgcaatgtggaaattcatattatcaggtttttttaaatgctttaagtaattttctaaaactccatcttgtttaaatatcttattaaactttgtaaccttttccctattattttgtatatcttctaattctaatggtacggttctaggtctataagtgaaaatatcctcatacatagtcataaaattgattcgaccagcgtcagtcctcaaatattgtaaatgcatgtataagtatataaattcctgttgctctttagtaactacaaaatcttcgtccataaagtgacttaaaatatatttgataaccgctcccatttgtgcttcgtaataactaagcttgttttctaaaatattatcgggagtgtcctcactttcatatgtgtagtttgaaaaacaggtactttcataattcatttttcttaatttattagctttccttatgtagacattcacctcacgacaatcatccgcaaagtatttcaaaagacatcttggatagtaatgttgtttctttgtaattgttttcttcctcattaaaactatacctcttcaataattaatggtgttgtgctaactatattaaaatcatacttgtattgtactgacatcaaaaagttagaaaaataatttaagtaaaggactagatcctttttgttttaccttaatgcgtttgttgtagtaatcaatatagtctacaataacttgttccaattgctagagtaatttaaacgtcttcttataaccattaaacctctcagattgcaaaacttacaaagatgaattaattcacaccattatctgtaccactcctcttacgtgacatgaatggttgaagctctttatcctctaaataacgatgataatatttgttttgatattactagccttggttactatgaagtattgtacttatgtaatgtttctcagtgaatgcctattataacatagccttcacttgtaataaattcggtaaagtagaaagattcaaatcaataatttcactgttaaaaccatctgaaactggtgataaatttagcttatgactgcttgctgaaatagtagattctatgacatctgtgtagcacttctccattggtttggatgcttcaaactgactttgaaaaaggttatctgctttcatatcatcctctctttagtacgaagaatttttccgtttacgacgaattctagccgttaaaccaaatactttcttatgattcactacaaagtcacgattctaaattcaaaagtcattcgacgatagccataattcttttgttctcagtaaaaatagcttgaagtcaacttcaaactcttcatctttgccaatcctacccagttacttaactgatagtagttagttgagcgaggcaaactagctgtttcaaaaagtaaatctaatcaaaatcctatggagactcttcctaaccatctctttttagctgtaaaacttcattcatgtcttatggacgcttcttttatcaggctgtctccctattattttctcaacatagtatacccttttttcttgtattatgcgattcaagtagaaagcattacttgggtttagagaacataatcaagacaaacattcgttgagatcgacctatgagtgggcctttattaattttttcttcctttaatttacgagaatcgtaacgattctttccttttttgacgaactctattccgtaacaatcaattaatttcagcttgtactttaacaagatcattcaccccaaattaattcgaaagtcgcttaaagatttctcctttctttctaagttcatagatttgaaccttgtcctcataagtcaattttataataaaaacacctcaaaagttagattttttctgtctaacttttagggtgcaattaattatataaggcgttttcaatctacaaaagtaatattcccagtatcttttactttctaaacaaaatcaaataatgaaatttcttcgtaaacttctacttcttctacctcattaacagaggtttcagaaactacttctgtagaaacattatcattatgttcttcagtcataccaaagagttcagaaatgctttctaggaagtcatcagccataacaagaacttcttgtgaaacaacaacatgagttgtttcttcaacgatttcttgagcaactactacttcttcctcaaagccagtttctgattcatctactgactcagcaataacttcaacaagttcgctttcttcatcaggatcatagctagcactatattcctcggtgattgaactaacttttacatcagagtcctcatccatttctggatggtctgccttgtactgcaattcaaatgtattgatagcctcttcaatttgttctacagtaggcttcttagactcatcttcaacttcgataagaggattaacaatggcacgtttagctgatacatagttaagacgagcttggtctgcaaaaacatctgcagcttctcctcgcttaatagtatctgcacaacggtcaatgttttcctgcaagagtttggcttgtttatccataccatcaataacattgttgatacgttggatagtcccaataccactcgcaaaatctagacgaacagcatagctattttgaccaataatatgcaggtcaagcatgcgttctggttgccaaggtgatttttgttccaacgcacgtagggcaaaaccacgataatgagcaagggttgtcattttcatatggagtggatcagaggcaacattcatctgcatagcatagttcagttgatttcctgcaacatctttcttagttgcttcgtatccatctggttcaaatgtcataacaaatgggttatgttcaacctcatatttcttaccatcttctttttcaaccacttctttccaaggttttgtcttttctgcaagctctttatcctggactaatagagaaagtttcttctcgtaattttctttatctttaagggcttgcttaatacgtttttgagacaaagcaatatcacgtttccaagccttacgacgattagacaacaactcaaattcattatcaagttccatcttaagtttaagatatggattgcctgtcgcaatggctttaaattcagaagctgagagtgtttgctcgtcaatatcctctgaagctcgcatcggtgtacgactggtcatgatttgcgtaatatagcggagctttgtttcttgaatctgccaaaggtagttatcaaagcttcctttagtgatatagtggaaaatatttaccttgcgatagatatttccttgacgaaccaaacgtccattacgttggataatatcagacggtttccaaggcacatcgagatgatgaacagctttcatacgacgttggacgttaagaccggttccccctttttccgttgaagccatgagaatacgaatctcaccagcattcatttgacgttgaagttggagcttagccttcttgttagcagcatcgtgaataaaagcaatctcttcttctggaattcctcgttcaacaagcaaatctttcaactcttgataaacagagaaacccttgccattaggagttccaaggtcagagaaaatcatctgtgtccctttatgcttagcttccatgtgataaatcttatccactcgctcaaccacttgcatgagtttatctgcatcagctcttacatagagctctgcatcaagcaaacgcatatctaaagccaactttctggcttcactagtgattttgagcatgttatcttcactaggatctacactcccatttttaactcggtctgagcgttctacaagctcatccaaataaaccttttggttatcagtcaactgactttcaaccgctaccttttctaccataggaactggaagattaaggtcttcagtcatttggatatctgcagtctgacgataaatcgccatcagctcaggaagattcataaatttagcaaagcgtttacgtgaaatgtacttatctccggtaggattaagctcgagactattctcaacaatcccaaaggcaccaacccaagcatcaaagaaactgacaccgaaatgctccataacatctggttgaagataattcatcatcgtatacatttcactgatagagttggaaactggtgttccagtcgcaaaaacaacatggcgtgtatcatgctcttcctgaagcacgcgcaccttcatttccatatccatattcttttttgaggtacggttggtaataccagcaacgttccccaaacgtgtcataggacggacattcttgtacccgtgggcttcgtcaacaaagagcatatcaataccaaggctttcaaagttgataaactcatcaataccagtcttgttctcaagcaacgtttctaagtttgcctcaagacttctacgcatagattgtgcttgtttgaatgtgattctgtcgtcattagcttttgcgtaactaatgatctcatcaagttcatcaatcttttcagaaataaaggcttgttcacattcttgtgagacacgaactttctcaaattgagaatggccaatcacaataccatcatagtcactcgttagaatacgagaaacgaacaagcgacgacgtgacttttcaaagtcctgctcagtcgtaacaaacactttcttagtcggatagaaacgcataatttcttgaccaaattgtgctgttagactagacggaaccacaaacaatggtttatgaataagcccaagctctttcatcttgaaagctgctgaaatcatggttagtgtcttaccagtacctacttcgtgagcgaggagtgcacgtctctcttcaagaatacgttggactgcattcttttggtgagggcgaagctctacacctttagccaacccatcaaattccaagagactaccgtcatattgacgtgtcacatagcgattaaagacttcattgtaggtatcttcaatcacttcttggactgttgggttttcatgaataaagtttttaaaactctcttgtagaacacgttcacactcacgtaggtttgctgtagccacttcatcaaccttacgtatcgggttttcagtcgtaccaaagttacgcatgattgttggttgattacttgtaagcaaatgagccacaatatctgttgcgtgtgagtagcttttattgtactcatcacgtagacctaaacgaaggttagattgacgactcatatagcagtttaacaagcgttcgttgaaacctcttccgattctggatttcactaatagtgatttagcttcttcagaatggagaccaaccttttcatccaacaattcattaaacacccattgagaaacgacattactaggaatccagctagaaccaatgctgaaatcaatatcagataagacaactggttctggtacaacagataaaatcaattccaaataacgttcccaatccgcttgtgtatctccgtcttcaatgagagatgtaatgcaatcacgtttagtaagaacatcacctgaaaggaatttatccttagtaacatagtgtacagtcttatcatcaatatagcgttccacatcaatcatcacagtctcacctagttcagaaatcatcatatcttctgagacatctggatagacagaactcatgaggttcaaatcaacgccacgaccttctgaaagtgacacattcaaagcttctactgctgacatcacttgatggaggtgttttttaggacgaatagttggctttttaaaagcatctgacttcacaaagactacctttgagctgtcattctcgtccaactcctctaattcaagactagcgataagagggtaacggtcatctcggtcaaaaaggcgagcattcaccgcttgattgatataaccatacttcttcttgaaagtatcgtagacttgattaagtgttgcaagcagttgtttgaattgtccttcatcatagtctgttgtcatttgaatatcaataattgcttgatatgcatttttgatagcaaccatgccacgaatacgtttgttttctgtatccgtaagaggtgtttcatagaaataaatacctttataaagtcctttacttttagctgctttagaaggtgtttgacttacccatgtattcgtaacaatatttgggtctccttctactgctgcttcaaagtctaaaatggcctcttctttgtatttatcatcatattttacgaactgtccttgttcgtcttgataaaaaatcatttcagctgcgcgtgagctaggacggatagacgtgttatcacgataatagacacgcccatttttatcacaagcatactcgttcaatcgaatatcaagtgaagcaagtaagtcttggtcaagatgattcacttcttctttaaggataatatcacgaggttctagtctctccacttcgaaaggcactgttacttttgatagtgcttcttgaagctctgaagctaagtcaaaagagctatctaccacaagatccagtgttccaccattgaaattacgtacctgataatcacctaggacacaaggatttttacaaatagcatcctggaagaaatagggattgagtgagacacgtttatcaaaggggagtttctttctatctgaagaccagaagtcgatattattatcgggaacagggataaaagctcctttttggaaaaataggatatctgttaccactcgtgttccagcatctttaaaagcagtatttggtaagcggacaccacctaaaaactgagttccgctacgacggagttctggcagaattgaaccagcactcttatctgcagtaccagttgaagtgatagcagcaaccatcccatgatagggtaccaaatcgatagccttcttaaagaagtaatcatgaatacgataaggtttattatcataagctttatcgacaatgcgaacatccgcaaatggaacattcgtaatgaccaagtcaaatggtgtcccttcaaagtttactgtttcaaatccttggactaaaacagtagcatcttgatgaaggtgtttagcaatagcacctgtaatggtatcaagttcaattccataaagagtagaattcttcttgatatcctctggcattgtttcaaagaagataccagtacccattgatggatcaagaatattacctcctttaaacccactttctacaatcttatcccacattgcagtagcaatctctggacttgtgtagtaagccgtaagggagctcatttccatcgcacgatattcttctttagtgacaagactttttagctcatcacgttcttttgcaaaacgattaatcttactatcaaagaaatcgttagcaagccctccccaaccaacatagttagagagaatttcttgttcggcactatcggctagacggttatctgcttcgagtgctttcacaagtttaatggcagaaaggttagcttgaaccttttctgcttttgtcattgttttagtattatttttttgttcttccattgttgttctttctccttaaaactaaaaaagacctggtataaaaccaagtctttctttttagttatagtatttgttaatacgactcaagaataagtgagtgcttatcaaagcttttgctgacagtctgactgtcatagctttactcttattttctatttaaattaggatgatggtcttctaaaacaaacttttcatcgttgagttctggtattgatacccaataaaaatcatcggtatcaaaaccgtgtgtcatagcaatttcgtgccagacatctggagctgtataggtataacctaaaagttcctttcggttttttcgtccaaaatcaatttgacgcccttttagaaaatcaaccatacgttcataggtgaattctgtgttcaacaaaaaatcatcttccctttcaaacgtatctaaggtcttactgattgtatcaaccaggtatttcccaatcatcttttgattgttataaagaacaatagtcaacttcatgacgtttctccctgaattatacatgaaatcacgtatagtgttatctctagtataacatgaaaacgcagttgactcataatgagttctaagtttcattttttctccttttatctaaaactcaattttaagctttccacaatgagctaaaaattgttctgcttctttctttgcctcttcatctgcggatttgttcctttctcctttcaattgaatgatcctattgtttttcaattcaagagtatagagaggggtttctctgtcagttttatcacgaacaaagacaataatagaagttccgtagacaaagtgtttttttgcataacttccaacacaatgatgtagggttttgccttctttgacaatttcactttcgtctttaggaaagataaaagcatacttgtcaaatgcggtctgagccttcatcatgtttgtcaaacgtttagctgtttcaatcttcaacttcgcctctttcttttcgtcctcaaggcgttgtttctcttctctcaaatctctgacagcattagttacacgtaaatatgtaccacgtgcttgttgattctcgagaagagctgaataattttctacgatctctgtatgtttattttcccaattttttgggataactacataatctccatcaaatggaattcccagagcttctaccatttcttgatagtcctcataatcacgaagggagatattgtttttcatcatccagttaataaaacgaattggtttcacagtggatggtatgatactttccaaacgcttaattagtggcttcttgtcagaaatcatagcgtctgtaatcaactcgtataaccccttgaaagttcgaccatatcgtctacgcaaatcttcctcaaaaaatgccttttcaacattcatatccgtattttttagaaacggtttattccttttaagaaagttcatggtaaccttacccatatttgcatgaccatgtcctagactagatgagtaataagacctataaaaagtagaccctaccaagtctttgacgattccacgcgccttgattttttgagcgaattcaatacgttctctatatttatagaggtgaggtagtactaagtttatctcaaaattatctttaatcacttgtccaaaatctaaatatctcaactcagactttgtttgtaatttctgaataagactttccatatccccataaagcgtatagacactaaatgcaccagaaccaaaaaagagagcattcctctgattttggaatccacttctatagatatctttacctttttgggctgaaagatatggatcccggtgggctttaacaatcttattgttggcaagctgataaaagttgtaaagtctgactttgaacttttcttttcctttttcgaaggattgagtcacagaatacatctgcatttcaatgcgtttctttgtaactcccatccagacatagtagaaagtatctcctacaaaggtcaaacggctattaagtgataagcgttttgtaaccttttccgaaaatttttttcggtctgaagagataattgtcctggacttattagtccattcatagataggaaaatcattcatcgcccacttgaaaaatccgttaggaacttttagacgattgtcaacgatttcttgaatagtcatttcttttgtcattgtttttctccttaatcaataaaaaatggccctaggaccatttttttcatcatttttgttaaaattccccttcttcaacagataaatctgaaaaaagatctaactgtttcccaacctctttaggcattttctttgtttttgggggctttttaggcttcttggttgattctttgctaccagtagtcgttttacctgctactgatttagtctcaactttaggggggttctttttagtttggctcttctttttgggattttttgttggtttcttactaccagtagccatcctaccaaaaacagaacctatttctacttcttcctcagtaaaatactccttaacccaagaaaagaccgtatcatcatcaaccatggccccttgaccatttttatagtcagatttactggcttttctgatgcagtaacgcatagcattcttaatcgtacgatcaaggtgtgttaggattccagaaatcagctcatcatcctcttgatgatcaactatccaattatgaatagcatcctcagtcggcgtgtgagcttccgccatttcatcatcaaaatggcttactgccatgaagcggtcaaaagcatcaatcttaattttatctgtcattgtttttctcctcttttatttaactaaagctacgtttcgtttcccatcttgtccttgtttcatttctaaaacatcatgtgggattaaaaagtcatcttgataggctgttgtaacgacacttaatcctgcagaaacagccttaagtactgcttctacttcttcttgtgtattagcttcaccgataaataagacattgggattaaagcgtgggactaaagtgaccagagcatcatagtccatacggttaacctcattgacttgtagctggccaaaagatacatccttaatttcgacatgtctttcaattgtcattacttgcccttctttaaaagcttcagcaattatcaagtaggctaaagtcgttttgccaacacctgcacgaccagtaatgatgtgtaagcccggaatgcgtacttgttcaagtacgttttccaagctactatcaaaatcaaagtcacgtaaacaaactcgatgctcatccctattgatacaatctaatagtcgtatagccatcgtttctagtcctcgaaaatcgcctaccgtggatatcctgatggtgataactctcccatcatccaacggatagtcacaagtacctagttgcccacgccgtttttcgatcacaatcatatcagccgtaacttttatatgattaaatagaacatccgcatcttctgatgaaatgtggtcatagacctgtttgacaccagcttttctaaatgctacctcgtattcttcaccatgtgggaagaaggtaatatcttggatattgttatcgatagcttctttcaaagcctgtttaatgtaagtaatcattgtttttctcctctcagaactcaaacaagcttaactgctcaccttcagtcgttggtttatcgtcaagtggctttcgacaagctactagtgcttttggcaccttctcgaccttataaataggttgcatggcatagtagttctcaaagaacgtatcaaaaaatgcaaacaaaaggtgtcgacattgccttaaagccctatactctaatcgagtatagtaagttgtttcatcagatagcaattctgaatccttggtataagtttcaaaaacccaccattcaaagccacgtgcaaacacctcggttggtgtcaaataatagtccaacttcttcttaatgtgaacagcttgagctaagtccgttctggtttcctcagctatttgaattaacttcagcaagctagccttgtagatatatcgaatatctttaaagctatgtgacgtagaactaatgattccagttttatcatacgtatagtctaaataatgtccatactcatgtatgaatgatgaggaatctcttacatcaactgccatgatatttaaccctggcacataaagtccgcttgctttatgttttcctagctttcggaatttgagttcaggttctacagtcgaatgaggtaagtgattacacaacttctcccattcgttctctaaaactttaaatttctccttgtcaaaatcactacctcgataacgctcagtatcaacttcaactttcgaaaaccctaaatcaagaaatgacgtgttactgttcatttcattatcttgaaagattttatcctcacgcacactggctatcgtcttagttgactgattaacatattgtgcattaaggttggctgcaagagcatcttcatactctcttttaagaacgttagctatcttttggatatttccataataactacattccttatagataccttcactatggatagacatcaattcaagaaagctaaaagatactagtccataccttgtttgagaacttctctctctccaaaaacttaggtttttcttcaaaggtactctaacctttgaatcgtcgacaatgagaagatacaaagtgcgtttggtattttctgcgcttttagtagcaggtaatctactcccatggagtgtgagaagaatctgttcaccgaaaaggtgttcgtgattttcttcatccctcaagctcatgctctcgaacagtctttttagcttattcgaaaaatgtgcttgatcataaccaatggtttcaatatcagccatgatgtctttgactttataggctgtataaacattatcttgtccaaatacctctactgctagtgctccgacttcttgagataaaagttcctgaccttgatatctgcgaatattcgcatagtaagtacaaaactttctcacgatatctgcagctttatcagtctcttttatcttaggaaaagtgacttttttagtcgtttgctgtgctactgctagtaaattagtcattgtttttctccttaatagcaaaaaggaaggtaaagcttaaagctactaccttcctctttctcttatatgtactgtgtacgatacactatgaactatacatagtataacatgcaatttattgcgtaaaaaaaggaaacctaattattgttatcaagtttccttgcataatctcgtttgtgactctctatatttcgagaaatatcattcttatcccagatttgtaactcccaaggataatagaaatgactcttgtttttaaagtagagatggatgccagtatagtcttcagtatcttttaaataccaattttttagaccgtattcttccttccaatcatctaaacgatccatcacttcagtaatgacagatgttggcaaaatgacacgtgctccaaaaatatcatttaaaaccgaatttactggatacccttctggtcttttagtaaaacgctcaatcttatctaaaatagattcagatgtcttcactctatagaagtaactaatatctctgacatctgctaccatcaaataatcgttgatagattcgtgcagattcaaacgatattttagaatctcatcaactggtaccttcgcaaaagtgttattaagattgactttagcaagtttaccattttcaaaatactcttctgaatactttatatgaatggtgttgatttcaaagatcagtcgctctactttcttgatatccaacccttatacgtctccaaataatttttcttcattataccatatcctgtttattaaacgttttgaacttaatcttttcttctggggaagctttcaaaaggaaatcatcaattcccttttcgtgaggccagattagagcacgaaccgtacaagattgcttagtaactagatcttgaaccatgtcatacatacgttcaaataccgagtcattatcctcaaagtcttggtcaaatgcaagataaattggtttaacctttttgagttcagtctttccgataaagtccgagataggacgccatgctgctactcctgccatagagataacacagatattccccaattgaaaaagacgagtgtttttcgcaactgatgcagtgatatctcctttaagcaaaccttccgtaactagaaggttatcaactttactcataaggtttactttagccttacctgcatccgaaaagcgtgcttgttttaaaatatcatcggaataagcaaaatggggaaaagacttagcacttgttccttctggcttatatgctgacgaaacaaagacatatttttgcccttttttaaatgtcaactcaagtccagaacgaagtttaacactagtttccttagttgtcccacttgctagttcgtgtgatgaacctttagcaaacacataccaatcgaaacttccatcgtcattttggaagaccttagcagtacgtgcatttcgtccctcttgaaaggcttcgtttactttggcttgataactaacgttatcaagacgtacttgaaaacctacaatttgtccccaagaattgcgacatggaattaggattccatcttttgattcaaaaataggacattttgcgttttcgttccaatagaaaccaggaactccacgccaagcgtctttaggaagtccatttgcaacaaaaagcttttcccaaatagttgctggatgagatactgttgtatcaacctgcttctggcgtgtttgctttgttgatgaagcgtagccacgcagtgcaatggtctcaacagaaagacctcgttccgcacttgttaagtgctctacatgttccttagtcaatcccaacacatcaataacaagagaatttactttgtgaagtgttgagatacttgccaaaggttgacttttccaactaggttcaaaagtcacctctttcgcttttttagggtccaaatcataaatagtcccagcactaccaaattgtggtttgtctaggtcaatctttctagcacagacagccttagtctgatctgcaaaaaccagacaccaatctggtttcccacaaataggacaagggtaatcacgtcctaccctaatcatttcggtttgtccaatcgtaataatttttgtcatttttttctccttataaaatataacattgttgttgtaaagtgaccttagaaagtctcaaacacctgttcgaagcctttcctccgtttgccgacaagttagagttgggaacacctgttcctcacctctaatcatcgagatgtcgccttcctttttcgtccgtctacccaaactcaaaacaaaaaaagcataacaaagaagccggcaagccttgtctcaaaaaacaaggttgcgcgtgcctatggcaaaccataggataaacttctcgttatgcttagttgctaataacgtttgttgtagcctttcaaaaaattaaaggcaaattatctcgtacctgttgtaagcgtcaagccccttcttctgtctgatggcttaactgatagctaaaagcgagtacgctcccttttaacccaatcaaacatgtgatacctattgctgggacagaaccagtaatagcatctcctcttccatgtttacttttaaaatagtcacttgactatgaattcaccgttagaggtagtgaaaaaagatataaatataattatttatgactttagtatagcaaagagaaactaacattacaagttaatcgttattcgaattataactatatatactactcttcattgtattatatactatacatagtctatagtttacaacacattatgtatagctcaccattcgtaacaaacgtagaaccaaacgtcatgaaataaagcatacaagatacattactaaactatgtatcttgtatcgtaaatcacctattacgctctttatactattttttatatataacttattaaacaataaaatgtaatcatatatatagtttcaaaatgtatcgttcactatacatcgtagactatctacaatatacgataaataataaacaatatattatttacactacatattgtatcgtgtatagcaatgtatgttgatgttctttattttcagaagtatttaataaaagatatacgatacaatacttagtaatacattatttaactatatactctacatcgtctataatatacgataaaagatttacaatttgtttcattactcatatatatagtaatgctatgtatagtgtagtgtgtaaattgtattacgtttgagttagaactcgaatatgatgctatacactatatatcaatacagtatgtataatatatagtggtaatatacatcgtctaatatacattatcttattttatataacatatagtgtatcgggtatactctagttatggtttgatactctgtaatattttttgttattgaatagtataaggaatagatgaaagatatacgatataatacttagcaatacattatttaataatatattttacatcgtctaccgtacattcttatattttatataatatataatgtatcgtgtattattcttgctgagttttgatactatgatatatgctttttttcaaaacagcatatagtgaacgatacactatgtataacttaatgcgtaacaatcaggttttaaaaagttttatatactatacatagtgtatcttgtattatttacgatatatctacatactacttgatattcgatttctatatggtatactttaagtagttaattacatgtatcgttttgttatacatagtgtatcgtatatattgtattgagaggagtagatatggttgcaaatacaatcgtagtaatggatgaaaaaggaggagcagccaaaacaacattaagtttattattggctcaagctctaggaaatgctggctataaaacgtgtgcaggtgacttagatggacagtgcaatctaactacagcagcaggagtgaacgaagacgaacaagaaggtatttattctgtactaaaaaaagaagtagaagtagctgatgctattgtcccggttgacggatatgatctgcttccaggtagtaagctgatgaagaactgggagagtgaagcatctggtttaaaagatagagattttcgtttaagaaatgttgttcaagatatcaatgactactatgattttgttctctttgatacccctcctttctttggcgtttcaacaactagtacgctttttactaattctaaagtttttgtacttatccctacaacacctgataagtttggtatcgaaggtgtaaaggatacaatcgaagatattgaagcagttcaagaaggattctctttctttggaattgatattgttatagctgggatcgttataactcaggttgataaagggccaggctttagtaaaaaatcaattaaacaagtcaaagcaagagaagcagtatcaactcttgagaaaattgcggaagaacataatactaaagtttttgagcaatacttatttaataataaacaatacaaagatatgattgctaatcaagcaaatgtttttacaaatagtggctatagcatccctcaaaaacaaatcacaaatgttatgaatgaactaattaagacgattggagaacacgatgccgaaaaagcttaatacaatccaacaaagaaattttaataaccttttatcagctgttgaatcaaatgatcgcacaacagctaaagaagtatttgaccgtttttttaaagggaaagagattgaagaagtagtaattgataaacttaaggagaagcatgatattgcttttctaactgaagaaattgtagaacccaaaaaggctgctgtttctcctaaaaaagtaaacattgttactcagaaaaaagaaaaaaacaaaattcctactaaacttgaaccagcaaaaaccccggaagaaaaagtgcgttcaaatctaaacatgacacaattatcaatgtctcgttttagtgcattaagagctgttttaaataaaaaagacctcaaaggagaaaatggcaattatcctaaacgtggaggatctgataagctattcactgaaatgttagatcagatgtaccaacttctagatgaagaacaaaaagagttgtttaatacattggtagaaactgagatgagttttaaataatctaatttaacatgtagttatcatacaaaaatgtaggtaactcgaattgaaatcattttttgcatacaaaagtgtaggtaattactacactttttgttttgttgtgattttaaatatagtttagagagaacatagtgatgttttaaagcttattattactaattttgttttagtaataatagtttaaatagtattaagtagtattaagtggttaattatagtttaagtagtagaactcctgaaacccttgctattattgagctaagcctacctttatcatataaaagtgtatgtatatcctacatattggcaggtatatcatataactttgcatgaaagtcacacaaagttgtatgttaagtctacaaaaatgtatgtatgtcatataaaattgcaggcgtatcctacaaaacggtatgtatgtcctataaatttgtatgttaagtctacaaaaatgcatgtatgtcatataaaattgcatgtatatcctacaaaatggttgtaaatttaaaaaaatactatgaaaatcagaatattagtgatataatgtcatacaaaagggttgtaaattaatatttttataccctgtcacatattgcagtaagtaattagcttgtagtaaaataattacttttatttaaaatacaaccaaaatgtatgatgaatgaactaagagaggtagaagcatttggtagagaatagagagttcagagagatcatcaaatatgataataagtttacccaaatgttccaacttggagacctttctcctcttcaagaaaacatgatttattctatatttggtgagttgcgagatgtttatgacgaaaacgaagcagcaatcttttcttattcgagtctggcaatgctagcaggaaatacattttacagctctagggaacaaaaaattgttcctaggactggtaaacgctttgaaactacagttgaggaactagaggaaagaatgactaaaattgtatatcgacatcccgaaaaggttgtcgatggtaaggtagtctcttacacctccatcccactgttcaagacctttagagtagaccacgaaaataaactcattaaaatccacttgtctgatgcggaatatactgaatatgatgaagtaactacagaagatggaacaaaagtaaaagtagcggttaggcgtacagttaaagacctttttaacaacccagagtggggtaaaaaagctaagtacattcagtatggtcgtgactaccataatctattgaagagtaagtattctaaacgattatttagacatttagcagactggcgtaaaacaggctttgtaaaagatacagctcacgagcttgagcaagaagttttgattttggatagtcctagtttacttcgttcgaaaggtactaagctgcaacaagcaatggatgaaatcaatacgctattggtcgatgagcatggacttcctgttattcaagatttgacagtcgagcgaatcaaaaaaggaaaatcaattacccactatatatttaggtttaaaccgttcgatgacgatttgagacgtattgttgcaacaaacgataaagtcattacctttgagaagaagaaggagttagacttcaaacgtaagatggctattgtcatggagaaattctacactgtttttcctaaagggagcaaagctgacaactacaataataaaaatcaactcaaacgttggcttgaaacaatggaccatgaactagttattgaggcgttggaaagaacaggaagtgatgcaaaccgtacttttggttggacaagaacattgctcaataaatgggaagtagcgggatacacaaagctttcagacttgagagatagtcacccaactaataaggataatcgtccttcaaatgttccagactggtctgagccaaactatgaaaatggaacggatgacaaagaccgtttaagactagtagtggtagcagtaaaatcagcaattaaaatagaactctcaaagattcctgacgaagataataagtcggatattaaacatttagcagagaaactgttacaagagaagctgtgggaacttaaagataaaggattagagtcactgtctgatagtcattttgaagagacaagagaacaacttttgactgagatacttgattattttaaagtataacttcagttgtatttttgtaaatagattatatatataatagcgatacacgatgtatcgctattttgttatgcgattttaagtccgtttcgctccaaaggtgcgaaacaaataaacgacccgctatgcggatgcgcatcgaaggttataccgtcataacaaaaacactccaaacgagttacaatataggtgttcaagccaattgtaaaacgaaaggagttaagactatggcgcaaaaagctcacagtttatcacatacaaaatggatgtgtaagtaccacattgtatttacacctaagtatagacgaaaaataatctataatcaatataggagtagtctgggagagatttttcatagactataccactataaaggtgttgaaataattgaaggccacttaatgccagatcatgtccacatgttagtaagtattcccccacgaatgagtgtggctagttttatgggatatttaaaaggtaaaagtgcattaatgatgtttgaaaaacacggcaatttaaaatataaatttggtaacagacatttttgggcagaaggttattatgtaagtacagtaggacttaatgaagccacaattaagaaatatattcaggaacaagagaaacatgatatcgcattggacaaattaagcgttaaagaatatgaaaatccctttagggaaacggtaagtaatgcgaatgcctctttgagaggcttgtgacgagtcaaaagcaataaagcttgaacaaagtgaaagccagcgtctttaggcgctggctggtattatgggcttatagcccttgatcaaaccacccgttagacgcgtggttatgatttagagattatttatactagttaaatctaaaaaaaacatacaattttgtatgatataataggtctaaaaatataagtggtaaacgtgtagttaattactatcagtgttgagaggagggagaatatgtcgaaacagaaagataaatatctaacactaagaagtcaattaccagaactaatagacgaatatatagcttaccttcaagtagatgttgaagaaccttctcccaaaatggtcgaacgtttgtcagtgattcagaaatttttaaatagctatgcaattacgattgataaagagggtgtctcactatcattgacagacttagaaaaaataccacgagaatttgttcaaaattatttggcaaatttacgtctgaaaccagcgggaaaaagatttattctctatactttggcaggattttggaattatcttacgaatacctcttttacaattgagagagggatgccgttgttttatcgtaacgtgtttaatgaatggaagatagtttataaagagagttatcacaacataatatattctgaatcaaagaagaagactattttgtatacgcagcaagagctcgaagagttgcttgatttcatggcaaacagttatgttacaacgctaccaactcagaagaaggctgataattgggaaaaggagaaggagcgaaatattgctatatttgcaatcataattggtactggagcaagtactcaagaagttgttaacttgacagtcagggatattgatatgcgtaaaaaaggaatttgggttgttagaaacaacgagaaacagtttatacgttttctacccttcacagttccttacatagctccatttgttaaggaacgccggggacgctgggatttggatccttctataccatcattatttttaaccatgttgaaaaagcctatgggaagaaatacaataggtcatttggcaaagaacattggacatgcttatggaaaggtaatcacgcctagtattttaaaagacagccacgcctctattgtctataaagagacaggtgatattaagaaagttgctgaaatacaaggctatagtttagacaagaatcacctcataagatttatcgaataataatattgataaaatcctatattagtaaaaggccacttgaggcctttttgatgtcactgggttacgaatagagactcctgtgtctataatgaatttatagagatttaaggaggtcttatgctaaaaaaaagcaatgaaaaaagaggttgtcttggcaatctgatttggataccgatatctattattgttatgttttgtatagctggatatggtatgtcccaaggaattaatgtacctggtattttatctagtggctttaatgttattagtaaaggggagcatgccaattcaagtgatgtcggaaaattatttgggagatttattcccaagtcagaatcttcggaaacaggaaacagttcttctaaaacaagtggtgtaaagtctgatgctttcaactacagtccattgccttttgaaaaccataagctaatggtcaatggagatttggatagtcttggtagagcaacatatggtcacatcagactaaagtattcggataaaccacaagatgatagggaaagtaaaattaatgttgatccagtcggttggcataactatcgttttaagtacgaagatgagtctggaaaagtcaaaaaagcttatctgatgaatcgtggccatcttattggttatcagttttctggattgaattctgaaattaaaaatctagtacctatgacacgctatttgaatgcaggaacgatgtctgatagtaaaacggatgctaataatccaaacggtatgctatactacgaaaatgcactagccaaatggttgaagaaaaaccaaaatatgtacttagattattgtgttgttgcaaactatactgacaatgagttagtacctaggactgtgacgctttactggacatcctttgatgaaaatgggactcaatatggagttgaactatcagaagcaggattagcaacgagtgatggaaatgtgagttcggtcacacttcagaatgtttcaaagaatgctaatattaactacttagatggtacagccacaagtaattactaacattgactatagaatgttttatgctaaaataagaatcagcgtaagcgtttgaacaacaaaaagggggggtatagcctcttttttgttgatataatggatttttaaagatatctcttgatttgttgctctctagccttgcattgatatcaaaaatctatataataataattaaaacagagccagaagaaagggtgagaattatgtttatgatcttggttctattactaacattagcgagtttcttctatgttgccatcggtattgccaagaaaatcttttcaattttcgccttaattacaccaattatagtcttgggtgttgggcttcttatcgctatgaattaacaaaagtcaaggggggtcactatcttacaggtagtgaccttttttgttatgcttttaatgtcaaaaaagacattaaaggagaaacatatgaaagcacttaaacttataagagaggacggttatgagaacgtccattatgctagtttaggggagcaaaaatttaaaacattggttgttgctgatagaaaagatgaacaagaacaatggtttgagcaaccagaaattgaatgtgtcccagaggaagtctcagatatcattcgaaactacacactcccatatattgatcttggaaatactgaagatgagtatttgttagaacaagcaactaataaggttgtatcagttgtggtagagaatgtacttgaaacacagccatttattccgagaaatagaaatggtcgccctatcggtgaaggtgtcgctttctgcgatatgttagtagggcgtgttcagaatggagaacttgctggaacaacagtttatattaagcaaacagaatctggcttccgccaaccaaaagacttctttaaaatggttgggcgtattttcccttgcaaattaactgaaattcatatccaaactatcgacaattataaactaacgattaataacccatcaaactatgttgttgaaggtagtattgagttagctgagtggttaactaattaccagcttcttcagcaaattgaaaagagtaaagataactcttctcgtaatcgagatagaaaaaacatcttggaacgtactcatgaaggtattgtatctgccgtgattaacaatggtagcaatgcaggtatcatggtaatgaccaaaaaattacaaacggtatttattccaaaacatagggtaagttatgagtgtgattcttcatttgttaacctagacgaagtagtatcagtctttgatagggtggaatttaaaattactggggccaatacccaaaaaccaagtccaaatcaaagagaacgtcacattattcatgactatattcgtatcgagggagatatgaaagttctcgaagaagcacctcaagatgctttgattgagatgattgataataagaaagtcataggacgattgtttaaagtgcgatttatcagttttgatccacagagtctacatacagtagagttggttgactttccaggtatcaaaataaaaatgaaggactcaggttctttaaatcgagttccttttaagcaaggagatgaaatttcagttgttattcaagatgctcattatcgctgggtagacgcaaatagcagggggcgtcgagtggctaaaaaaactgaagaagtgagcagtaattcacagaatacggaagagaaaaaatgtctgtttcgtatcaaatcacgtttcaatagtttctatccaaatcgtgtgaacagtaaaatcttatcaacattttttactagttgagtcgcatatagttccctctgaaatgggaactttttgtttacgttcggaacagaaaaatttaacaaggagggatcatgaatcatcacaatatcaatgctattgtctattatctgatagtctttattcgctatgtcttacctattaccttggtcttcatcggtatcggtaggtggagttatgctaaatctatcaataatccagagaaacaaattatgggagtaaattttgctttaaaatcaattttattcttatatatcgttacatttatccctattttcatcatctatggactcgcaatgatatcaaagggaggcacacatagtggtgacttctctatgattagtttcgtagaggtctttaccctaatagaaattctagcagttggaatattacctgcatatggtttcatacagggatacatatatcactatcaatggttgattacagaaggtaagaaaacaacaagcttacctcgacgaaatctattcattagacttggaataataagtccgattgctattgttgtatttatggaattcttgaaaagaatgtttgcttactagagaggtgctttatgcggaagatcttgaaattattttttaatcgttattatacaaatggtaagcgaactatagatatcttattgtattgttggcgaaaatatattgattgggtatatcatatatcttttggattatttgctttcaatattattatgtttatctttagatggcgtttacctaattgggtatttatatctttatttatatttttgttcgttaatatggctttagttttatacattggtgtatggcacagtaatgttacaagtcgtcaaattttcgtgttatttaaaaaatatgataccttaaaacgagcagaacgaaagaagattattggtaagtatgctataagagcagcactagcagcagtacttatatcttctggattatatgtattaacaatcaataactttatcttatccctcatcaatcgtatgtatgatgtagcagataattatctcaaatatatgccctggtcaataccaaatggaagtcagacaggtattgtattaagttatcataccctcaaacctttaataggagctgactggtttaacagtttattattgttgactccgattggagcaattggtcttattttttataatagttatgcgactgggattgctgaaaaaacctatgagaaacttgttgagcaatggttaggaggacgttacttccaagacagtgtattaagtaatattgttcataatcaagatgaaaaaggtcaagcgaatttggttatgggacttaactctaaaactggagagcaagtgattttacatgctaatgagaggacttatcacactattatctttggtttgattggtactggtaaatcggcaacgattctgattccagcaatgctacaggatatggaaaatatgaaatactatctattatcctatcgtaagtatttgatgaaagtagatgaagaactggaacaagaattctttagcacagagtttgaacgtaagaaaaaaagacgtgaattgttggagcagtggtataacaatggttatgctgcagagcttacaaatggtatttatatgactgaaccatcaggttcgatgtatggcacaattgttaagtatgctcataaaatgggctttcctgatgaaatgatttggactctagatcctactaacccaggaactggtgcaattaatattttggatggagatactactcaggtaaaaggggctgttcgagacttatttaaacgatttagtgatccaagtgggactggttcttctttcttccttaaccaagaagggcaacttactgataatatcattacggtcattaaagaggtagcgttgataccagatgctccaataaactacatgttaaaaggtaagtctccaacactaactgaattctcaaatatgttacgttctagtgattggattgaagcctatattgttgtttttgaacaattactcaatcgaaagaaaaggctttttgaagaaacgctgaaaaagcatgaagagttcttagagcaggaaaaagaaaagtggttagaggaatcagagtacaatcgtgaacacgaacaactctttgatactatccttagaccagagaatgttcatgaagctataaacgcatttaatgatgaaagaaataaacttgaaaacctccaaagctcttatgattatttcatcaatgctcatcaattaaattcgtacacagaggaatattattatacctttgacgctaacgtttctggtctaaaagcagttattgatgacctatcatcttcaccagaaattcgccgtgtatttttctctcaaagtaccaaagatttagatattgttttaaaaacgggtggaatgattttggtcaattctgctaaaggtgttcttggtaaagaaaagtctcgaatggtagcacagatggtaacattagtaatgcaaaatgctgctcaaagacgtcttccagataagtctcctttctttgccttttatgaagatgaaaagaatggttatttgatgccaggtaatgatagtaacttcctagatgagtctcgtaagttccatgttccagttatgcatgcttatcaacatgacgaacaaattagagattctattggcgaatctggggctgatgcaatcaagatgtcttatcgtaatgcctttaccttccaacaaacctcaacaaaggttgtagagttcattaatctacgttcaggaggaaaacattatgctcttaaagaaaccaaacgtgcagcaaacgatgatctcttagcaggaaatcaggggaactcaagtgcgacttcagaggaagtagtagaagaagataacttcactgctagagatgcaaataacctagagaaattccaagttggtggtgttatcgtcagtgatgatgaagtatcaaatatgatttatttgacaacatctccgcattttgaaatggatatttcaaaggactcttttgtctcacatacacctttcaataaggtttatgggcttggagaggaagaaccggaaattgcaaaagcatacaagttgtggagagcagaagtggtagaatattatgctcaaaaagagtctgaaagccacctctatgaaagtgattttactgaagaagaatggcaagcaatcatggatgttagggtgccaaatgttgatagtaatgtaaatgatacagttggtaaaaaagatgattccccatcagttaaaagaacaatattagtcaacgagagtataacagaacatagagaaagtacttcaattagtgaagtggtaacagaggatattgagcaaaaagaggaggtcaataactcagaaattcctccatttgttgaagaaaaacaaactgtaaatagcaaaaatgatattggtgagttaaaggataaagaaataactcaaagagtgatcctagctccatcatctacacccgaaacagttgatactcaaaatattcaagcacctaatcaagagtttgaattacctcaagaactctctcgtgtagctcgtgagaaagcaactagaactttagaaagtaatgtagaacaaatggatattgatgaagaagaagggttttagacaacataataagcaacggaaatttccgttgcttttgttctaattttgagagtcattatacgtttctttattagtcttctcagcatcctttcttgctttttcttctgctctttttctcttaatttcctctttttcttctttgaccttattttgtgtttcaacaactaaatcatcaatagataaatctggattttctagttttttcaattcaaaatagatttgccctagtttatcagtttgtgatttttgataagctttaagttgctctgtagcttctttcttttgttgttctaaggcttcaagttccttgataaaatctgattcagtttttttgttttttcctgccataatttgctccttaattattaattatgtctaatagtatagagcaagaatattaaaagtcaacccatgtcactcccttgaaaataacctattctagggtatactgaacactatagcgacctattataaatgaatcctaaatgtagttattaagtgcttaaaaccccataaaaccggttgttacgagtattatgtaataaccagattttataaatgaaagtacagagagaacaaaagtctaagagtttactgtatttatagggttgatgactaatattagaaactcgtaaatcataaatgagtaaatagtggctactatatagctagaataaaccatgttttttagggattatcgttataaaaataaactacgacgttatgaatgagaggagatgaaagtatcaatcaacattttacgggtacaaaggaatgtttgagcaggtctatatcaaaggctaagcataactttaaaaataatagctatactcttcgaaaaaagaccagactatataccctattgattgactattttaggactacaaaatgcaagatataaaatatagagattttacctcacttatttcaaataaaaaaaataaaattcattacactcagagagataaaatagcttcttattttgtttcaaaaaagcaaaatacctcactgtcgttttcagaagaggagcttatcatcttttatcatttactaaggtttagttattttgataaggaaatagtagacctcatttatactgcagtaactcgaaaatccaaaacccctaattcatggttttatcgtcttgttggaaaggtgaatcatcctatttcagcatgttcggatgctagaagcggtaagagaaagatatattatctgaacaaaggttttagtacctggttgcttactatgattaaggggattgataaaatacggttgctaacgacaacgacagaatatgataggtcagtatatagcattgtcagtaataatcttctaggagggaaacctcaaaccgtaaatattcatgatctagagaccagacgattagttgctaaaatcttaaacaagcttttctttaaaaaccaagacaagtctgtatatgacctaaacatacaagtcgtatttcctattagtcgggttaatcttttattggttcctgatgctgttgtatttgtgaacgataaccctttttttattgagtatgaccgagcaacagaacgtcaaacaattctactttctaaaatatttggttatgcagaagaaccagcattcgaaaattctagtttatttttcgttttcgagaatagtcgtaaagataatacgcaagtatctaaacgtttaatgaactttttggaatatgtaaatgaggttgaggttgaaggtgtgactggacatgacatgttaaagcgtaaaaatatttctttattcagtcaaacaacaacaaatgcttctgacgttattgtcgaaatcattcaagaaaagatgttttcaaatcataaagattggtgtgattgcgaggcttatgatttttctgaactgcagaaaatagattatcttgtaaaggagatatcagaacctttagatgatgataaattccagttatcagctgttgttgaaacagactcttgggaattgaaagagtaccctatggtacctatggcatatatcaaaaatgacttgatttcacacttaactagtctctatgaagaattctcaatagagtatgaacatatgatcattgtattcccaaaagaagttctaccagaaaaaataaaactcccttttgatgattatttcttgattgtttatagatagagtaaaggtatttgtaaatggattatttggaatacttaggaagaagacttgtatggttagttgtttcgcttgtagttgtaatcgtagtaaaaagaccaagaattttgaaaaggctagccatagttagtgatgtagctattggaaaaatcaactactttgtttttccagcaattgcttgtttggttcttgtcacttattttattttgtacttgtttatggtagttacttttttcctatcatggcgttctctatcactgaataacgtgatggaaattattttacaaacggtattaatcagcccaacactctatactttatttgtcccacataacgaggttatcatgagagttgatgaattcatatcagcgaaagaagaataaataacgcgcagcaactgtaacacataatcattctctcaactatttaaaagtatgtaagaaagtcacatgatagtttgaatttgttgtaagtatctggtggtgttttaaagataaaaaagattgaaaggtaacggtaattaatgacaataaaaattgaatctgcttgggaaaccctttgtgatgctttccccaagctaaaggataatcctctttacaagggttggtatattagctatgcgatccttgtgacgttttctattttgacggtagttgtagtgaaccatagggttgtctatgcttttccgtttgattggcttggtttgctttttggaattatcttaccttgggtttttacaaccttttatatcgtatatcaaggtgtggaccatgctcaccagtttacatcgactaaagttgttcttgggttatttatgttaccagtaattctgattggttttacttctaattttaagaatgaatatagttatagcaatcgtatggttacttcagtttttgaccaagaactcactcaacaaagtttccacgcaacgaggattacatcaaaccaacttgattactttaagaaagataatgtcatttttccttataagaagaatacggcttcagagatatatgtgttctttagacctgattgcccttactgtcaaaaatcaattccagtactcaacaagagcttaactgaaaaagaacgaaacaagattatctatgttaatgttcttgacgaaagtggcaagaatttagctaaagctatgggggtagagaaagcagcaacagcagttatctatcataaggataagacttctggtggatggtccaaactaattgaacgaatggcaggtgggaagcatgctgcacctcgtcttgatgaggatgctattcgtgatatcgtatcagtcgcaaaggaggaaacaaaataatgtatttatcaaaaactctaagcaggcttagcctgctaactcatgacagaaaagaaagttcggcttataatgaaggtgaacaataccaatccgttgtctttaatagggctttgcctagcctgtatcaaaaactggatgaacaagagtcatgagataactcgaatatgccttgagcatgaaaataaaattactaatagcctcttgttctattgttcaatagttaacaggaggtttttgtaatggaagttatgattgaaacttgttgtggaattgatgtccaccaaaagtctatcgtttgttgtattctagatggtccactagaaagcaataaacctaaaaagattcagaaaaaatttggtacaacaactatagctctccaaaacgccttagattggttattggaaaatcacgtcacacatgtcttttttgaaagcactggccaatattgggtaccactctttaatatattctcagactcagaactcaatttgatattagctaacccccaacatattaagaatgtgcctggtcgaaaaacagacatgaaagatgccgaatggattgcacagctcggacgttgtggacttattgagccatcttacattccaagccctgaagtgatgcagttacgtttactcactcgtaggttacgttcttacaaacaacgtcaaactcaaataaagaatgagattcataacctcttacaacgtgctaatatcaaactaaccagctatctttctgatatcttctctaagacaggacagtctcttttaacgctctttatcaatggggaactcattgattatgacaatgtgacagcttgtattcacaagcatgtcaaagcaagtcccgaagaattaatggaggccatgaatgggaagttgtcactggaggatcgatttctcttggagcaaagcctagaagaatatcaattgtatcaaaaactcatgaataaattaaggagtgaaataatagcttatatcgaaaaggagtttccctgaagaaaatagattacttcaaatgattcctggtgtgagtgaaacttgtgcagccacaattttagctgagattggaccagatgtgaaggcttttcaatcagacgcacacttagcttcttgggctgggctctgcccaggatcttatgaaagtgctggcattaaaaaatcctcacatatcacgcaaggaaatcgatatatcaagcaggctttgaccatgtcgggattgattgcggctcactctaaagacaatgcgttttcatctttttatagcaaaatttcccaaagaggaagtaagatgaaagccgtcattgcttgcgcacataagctacttcgtatcatttacaaaattctcgcaacacaccaagaatacgacaaagaaaaagtgctaggactgaggcaacagttctaacaccaaaaatttaaaaaatctcaattacagtatagcacaagaagagttttttgcgctatttttaatgtttttttcaaataaaaaagacatttcagaatggattgccaacctaaatgcaggtgacgaggttgctattcagagaacacgtatggatggcattgtagtttctagtgagcgttgtattgttgacaagtggttaggaaagagacttatagttgtagacggaaagcattttgtccctagcactggtttgagacaaagtaactctctcgtatcaggtcaaaagacaatcgtggaacaacttttccccttagatgctttacttttatatgaggaagaacttgccaaaagagacaccattattcaaaatttgaaagagtctgcagaacttctagagcacgcgcagaattattcttctttagttgtttctagagtgcttcgtaagttgtctgtactggacgttggggatgtttatgatctaaatgaactacgttcctctagtaacacagaagacttagaagatagtgctttattggatagacggaaactctcagagaagaaacgttgtctaaagacccttgaccgtatgcttacgaacttgagtcaagataataccttgggtgcttttaagttaatctctcttttaggagaagtagcttctgaatttactgattctgaaaatgaggtaagtcaatgttagcctatatcattttgtttgtagttatgtttgctatcaagtgtgtcactcttacttttgtaaagaataaagagtctacagtagtcagtacttttttgagtggcacgaatctgattttccttaatactattgtctggttcctacgattaacagccatgacccaattttatcttttagttgtggacaataatctaactgttatccctataattgttggttttattcttcccaatatcttgttctggtttaagagtattaaagcttccttatcggatttgcttgtacgttggttaaaatcagtcattggtcataagtatagaacatgcccattttgtcatgaatcacatttattctttcgatacaccgaggaccgcacggctgcttattactatctcttgacagaggatgatagtcttgtggccattggagattttgataatagtgatcaccctgcacgattctttttaagtaacgacgaatcgcattttgatgaactggctgatactatgctaccttatatgttgcctggcatggaagaggcggtctatgtaggtgggcgacaacagcgattggctagagcattgtattgtgtcgattgccaggaacgagtcagtgaagatagtggggtacaatttggcgaagtgttattgaacaaggtaagctagttatttcaagtaggaaatatagttgaagttctcctgagaccatttcactaactagcgctgcttttctagctgtaaggcttcgttactatcctataacatataggtaaatctctgatcaagctacaaaaaagccagcactttgagtactggcttttttgtacaatctcttttaaattatattatttgattttaatagaagttaattaatgtcctaaaaaaaatcttgtccaattccacataattgctacctcttttattctcttattttttatggtgttattgtatcaaaactaaatgttttaacccttttttgtcgttatcgaacaataatttatcagaatcggtaaaaataaaacttagataagcaaaaagtgattaatttaagacctcttgtgataattgtaaaaatgatgctgtggttgaaatataatagtcgtgtcagttagggaaactaataagtgacccgaatagaatgaaaggagtaataagttgaaaaacgaaaaaaatttgctcgaagagcttgaaattgacattttggagttggacgatgtagaaggtattccagcaacagctgcatcaagtggtagcggtggtagtagtacgtgtgggtcaacctcatgttcatcatgttcatcaagttgtgcttaaggcatagtgcaatcatctcgttaaaaaaagaaaggaacataaaataaagaatgaaagatgaaaaaaatttgctcgaagagcttgaaatcgacattttggagttggacgatgtagaaggtattccagcaacagctgcatcaagtggtagcggtggtagtagtacgtgtgggtcaacctcatgttcatcatgttcatcaagttgtgcttaaggcatagtgcaatcatctcgttaaaaaaagaaaggaacataaaataaagaatgaaagatgaaaaaaatttgctcgaagagcttgaaatcgacattttgaagttggacgatgtagaaggtattccagcaacagctgcatcaagtggtagcggtggtagtagtacgtgtgggtcaacctcatgttcatcatgttcatcaagttgtgcttaaggcatagtgcaatcatctcgttaaaaaaagaaaggaacataaaataaagaatgaaagatgaaaaaaatttgctcgaagagcttgaaatcgacattttggagttggacgatgtagaaggtattccagcaacagctgcatcaagtggtagcggtggtagtagtacgtgtgggtcaacctcatgttcatcatgttcatcaagttgtgcttaaggcatagtgcaatcatctcgttaaaaaaagaaaggaacataaaataaagaatgaaagatgaaaaaaatttgctcgaagagcttgaaatcgacattttggagttggacgatgtagaaggtattccagcaacagctgcatcaagtggtagcggtggtagtagtacgtgtgggtcaacctcatgttcatcatgttcatcaagttgtgcttaaggcatagtgcaatcatctcgttaaaaaaagaaaggaacataaaataaagaatgaaagatgaaaaaaatttgctcgaagagcttgaaatcgacattttggagttggacgatgtagaaggtattccagcaacagctgcatcaagtggtagcggtggtagtagtacgtgtgggtcaacctcatgttcatcatgttcatcaagttgtgcttaaggcatagtgcaatcatctcgttaaaaaaagaaaggaacataaaataaagaatgaaagatgaaaaaaatttgctcgaagagcttgaaatcgacattttggagttggacgatgtagaaggtattccagcaacagctgcatcaagtggtagcggtggtagtagtacgtgtgggtcaacctcatgttcatcatgttcatcaagttgtgcttaaggcatagtgcaatcatctcgttaaaaaaagaaaggaacataaaataaagaatgaaagatgaaaaaaatttgctcgaagagcttgaaatcgacattttggagttggacgatgtagaaggtattccagcaacagctgcatcaagtggtagcggtggtagtagtacgtgtgggtcaacctcatgttcatcatgttcatcaagttgtgcttaaggcatagtgcaatcatctcgttaaaaaaagaaaggaacataaaataaagaatgaaagatgaaaaaaatttgctcgaagagcttgaaatcgacattttggagttggacgatgtagaaggtattccagcaacagctgcatcaagtggtagcggtggtagtagtacgtgtgggtcaacctcatgttcatcatgttcatcaagttgtgcttaaggcatagtgcaatcatctcgttaaaaaagaaaggaacataaaataaaaaaggaaacaagagaaataagtaaaggacttagttctgtattttacaggaccaagtccttttagttttaccttgattcgttaataagaaaaatggtctagcttgttccaatttacttattcgacttaaatctcttttcggaatcgttaaacatctcagacttaaagatgccgaataaggtttccatcatactattatctatactatttctctgtaatattttgttctagcataactatcacttgtaacaagttcgatgacgtagaaagattataggtaataatttcgctattaacgttatctaaaattagcgacaaatagagtttttagctgtttactggaatggcaaattctgtcacatctgagtagcattcttttcattgatttttgatgtttcaaataggtgatgattaagattctatgctttcttgcgaacctatctttggtaggaataatacttccgtttacgacgtattctagcgattaagccaagaactttcatcaaacgttggatctttttatgatttatcacaaagccatgttttcccaatttaagagtcattcgacgataaccataatttcctttatgctcataataaattgtctgaatttcgtctttaaactatttctctttgtcaagcccctccagttgcttcaactgatagtagtaagttgagcgaggtaaacgagccgtttcaagaagcaaatctagtcgaaatcctcctgaagccatttctctaattgtctctgcttttctcgctgtaaggcttcgtccctgtcttctagctcttttaacttttttaggtaagccacctcggtacgtaagcgttcattctcctcttggagtcgctctagttctgtcatttcttcccaagatttcttatgtttacgtcccattttaggtgctccccctcttgttttctcaacaatagtatacccatttttcttgtattgtgctgtccaatttgtcaatagcgaaggattcggtagagcataatctaaagatacactttttcgtgaacgaccttcaagtaggactttatcaatcatttcttgttttagttctggagaatagtaacaattcttacctttcttgacaatttctactccgtaacgatcaattaatttcaccatgtactttagaccagaaacatccacatcaaatttttttgaaagctgtttgaagctttgtccttgttttcttagttcataaatctgaactttatcgtcataactcaatttcataataaaacaccccaaaagttagattttttctgtctaacttttggggtgcagttcatcagtgtattaggagtcattaatttttaacaatttcttttaagttatattatttgattttaatagaagttgattaatgtcctaaaaaaaatcttgtccaattccacataattgctacctctttttattctcttattttttatggtgttattgtatcaaaactaaatgttttaacccttttttgtcgttatcgaacaataatttatcagaatcggtaaaaataaaacttagataagcaaaaagtgattaatttaagacctcttgtgataattgtaaaaatgatgctgtggttgaagtataataatcgtgtcagttaggagagctaataaatgaccccagatagaatgaaaggagtaataagttgaagatcgaaaaaatttacaagaagagtttgaaatcgacattttggagttagatgatatagaaggaattccattaacagatgtatcaagtggtaattattacgtatggaataaccttatgctcatcaagttttgaaaaaaataggaagatggacgtgcgatagataaacagaaatatatataatgttctttaattttgaacaattatatttgttttcatagtcatagaggaataagaacagatgagaaatttaaaatatgtcatccaagaggacagtatgctgctatcatattttggaaaaagatgtaggattgctttacctaaaaagctatctaaggatgaagttctacaactagttatttcaaatataaatgaaatttttggattaaagcaagagttttcaaaatcactcaccatgtttaagattggggaacaaatctttcgacttcccaaggaagccgaaacttccttaaaacgctttttcccagctataagattactttctgaggaagaagagtctttactgagacaaaatttgcagtttctaggaaatttgaaaggaacgttctaccttaaaacagatggaaagcaaatgattcatcaattagaagaaggaatttctatttatcacgtgctggaccaagcagacactatatttaaaacaccaactattaatcgtcttctagatattaatattttgaaaaatatatattttgagagtttaatagactcatttgatatcatcaatcgtcaaggaacatgtcacttagaaatttttactaatgaaaaagaaaaatatagttttgatgataccaacatggaggatcttgtttttaaagcagtcaaaaaaataatggagtctaaactaagttatagatacgtaggcatagggagaaatagaggcgaatgccttgaggattatttgatgaaacatggtgcctctagtactcctatattttgtcaagatagtttatcgaaattcttgggtcttgtacttgctaagaaggagaatctatgaatattcagcaatacgtaaaagtaatactgtcaaaatcttgtgaaacacagccaatagagctagtctaccaagggatgaggttatattttggagaactggattatttttactcaaacagagtagaagaagggataatcattttctgggatgaagacaaactgattgtaagtcccgtatttcataagaaagaaaaaaattgtagcatctgtttcttagaacatcggaggaaatttaaaatagatgattctattggaagagatggcgacacgattgaaatagaggataacaatttatttgaagaaaaatttctttacgtaatatctaacctgatacaggtcaaatcgcagcctcctttatttgattattttataattgaggattggaaaatttcaaagtgtcaattctttcgaattgctaattgtgacacctgtatttctaatagagaaagtgtagaagagatcttggctacaggaaatagtcgttgccaggcatcctctttgagagaaaagttgggagattattctgcttatattcaattgggtaattctgatactgggattttcaatagagagttaacaactctactagataatggtgtaacggttgaactacaatactcactttctaataatgagattatttcgggaattggtattgataaaagctataaaagagcaaaagctaaggcatttctagaagcgatggaacgttatagtggcattacctccaaggggcagaaacgatattggttctccatagaagacttgagagggaagtcaatcgatttcctaaatcctaacgattattttcttgaacttgagaaagaagaggtggctagtacgaataaatttttctggttgccagcttacaattaccaaagtaatgactatgctttaatacctgaagattttatcatttataaaacagagagaactcctgaaagtaaaaaattaatgaatatgagttcaaatggacatgcaattggaaatagctataaagaagcggttattttttcactttttgaaatgtacgaacgagatcattttcttgttcattggtacgagaaacagccacctcaagaaataaatcaagatagcattctagatgaagatattcaccattatttaagtatgattaaaaacttagggtatgaggtctcgatttatcaaatgctttctagcaaggtgataagcatttattggaccatcgctagaggaaaaaatggtagcaagtttgcgacttattcaacagcaggtgctcatctttttggaaagacggcaattatttctgcattaaaagagctatattttgcactttatatttatgatgaagacgtcgaacatattaaagaaaatgggcgacaaatgcaagctcaagatgttaaaactgtggcagatcatgcaatttattattcaattgaggatagaagtatacagtttaattttttgaaaggtgtagaggttatcgattttgaaataaaagatgactactctatcgagttagattcctactattcagatctattggagtttacgaataagctatttgggaatttttatatcgtagataataccccaaaaggtttgaaggaaattgggttatgcgaggtgaaagtgtttgttcctggtatgcaagatatgaattttggttatgcaaatcagtacatcaatcaccagcggattcatctggacggtaatcaggaagtaccaattcaccccttcccataatcttataattaaaagaggataaaaaatgaatttaattgaaattaacaatttaagaaaaaactatggcgtaaaagaagtcttgaaaggtttggatttgtccctaaagaatggtcaagtttatacattgcttggaaaaaacggtgcagggaaaacaacatttatcaatattttacttagactaatcaaggaagattctggtagcgtagtctcaaacgttagcgtaaaaaaagaagttggtgtagtctttcaggaagactattttccaaaagagacaacagtttcggatttgataaagctacaagcttcatttttccataagaaggttaatgttgatgaagaattaaaaataatgggattagagaaagagaagtttcaaaaggtaggaacactttcgggaggacaaaaacggaaactttcgttcctattagcgaccttacatgatcctaaacttttgattttggatgaacctactgctggtatggattatgatagtgtagaaaagtttgttcaacagattaaaaaattaaaggcaaagggaaaaacaattctcttaattacacacgatttgtaccaaattgaatcttttgcagattatattctgttgctaaatgaaggtgtattcgaagagaaaatctcagtaaatgatatgtttatggaatcgttgtatgaatttcccaaagagatggttatgagtggagctgcgaaggagcaattgttttataagaatgatcaaacttatgttttcagtagtccatacgcacaaaaaataattgaacaaaatggtattaggaatccagaaaactttaagcgtcataaacaagtagtagatattttcaaacgtatttcatttgtagaaggagataaataatgatttcaattgttcagcagataaaaaatagtttacaaaataagcgatttatcatttttacgattttattcccagtggtattttacgttttctttataaagcaacttaagtttgtaaacacagatgatagtggaatgattgcattgttttctgctatgtttggaatcgcaggaagtggcttgaacacctttagtcaaaaagtatcgaaagacaaagactacttccgtattatggataaaatctcgccctattcttatgcacattatatgtttgatagtgtattagcacaaacgatcttgaatattttaattttgttctcagttactttagctggtgtattgattggtaaattaaatgtaacagggtcttacttgtcaatttctagtctcctgctatactttggcttttattatattgttattggcttcctattaggaacagtatttaatgatgaaacacttgcttctgcctcaatgccaatctttttcctattcatgatgcttaatattactccaaatatcatgacaacattaaaaatgccagatatcattgtaacgattcagaaatttttcccgggctattattataatgaagttttattgcatcagactccagaaaagttcttacaagcatgcttggtcattacaatttatgtttttatcgcagggactatcacagtaattgtaaataaattgttacaaattaataggagagactaatggtagaaatgacttcagataggttgttttcacactatgaacaattacataggcgacctgagccaggtttttcagaagaaaaaactaagtgttatattaaagacttcttaagtccatatccagaactaaaaaaaatttcggaaggtaagatgggattgatttatcaatacgtagggcgaaaggaagaaaaacatcattatgatttagcttttcgtgctgaattagatgctgtagaaatggatgaattctatggaacctactatcatggttgtggacatgatgcacatacaagtatccaactggaattaatcacctatgtttgtcgtaacaaaccaaagctaaatgtacttttcatttttcaagcaagtgaagaaaagtatggtggtgcaaaagaagtttgtaagtttttgaaagacaaaaggattactttatcgagaatatatgctttacacgttacctcggatttgtatcccaattatgtatcaatcaataagggagacattctagctgctggtttgacttgccatttaaaactttcattaaagaatagtggacatgtcagtaatcatggggacagtgcagcgagtttattttctaaattagttttactatcagaaagcctagatgaactggattgtcagtgtagaattactaactttttcaccaatggctctcataatgtatctcctacagaaataaaatttaatattacgtttagaggaaaaagtagtgatatttgcaagcagcaacatcagaaatttttagatcagttaaacctagaatatcaaaaggaagttattatggattatcctttattacataataatacaatgctatatgaatgggttgaacaagtattatctcaaagtaaagtagtaaagactctaaaaactccatttttgttttcttgtgatgattttgccttctatggaaaagagctagatgtaccgacatgttatttctttattggtgcatatagtcagggtcatccgattcattcgaatgaatttattacaccgaaggctagcttattaagaggtttgtatgtgatgacattattgatagaaaaggagaatgagcgaattaatggttaaaaatgtatattatagaaaaacaaatttttcgaatggcgaattttctaagttttttcaaaaagaaatatttgaaaaaatacgaaataatcaaaaatatcgcctcaatttgttaaaacaagtgagttctattcgagaatcgggaattgaacaattaaatcaagttattcaggaatgtccggaaggtaaagataagaagcaattgttaaagttctcgcatgacttctacaataatagaggagatttaggaaagaaatttcaaaaaatagtatttctacttccaccagatttagcatcagaatttgattcttattttaaaatgaaagaacaaattttgatgattgataatagaattgaagaacaggtagatcaacaatatttaaatgagaaacaaatgatgctacagggacttcgtgataatctagattttgttcagaacacaaagatgattgggcagactctctatcaaaagttagaaaagctactcaaaacagatgttaaaaatcataataagaagcaacggcaaatggatggttttttgtacaattattatactcgtattgctacaaagacaagtcccttggggttattaggcacaacaagtgtttatgggcaagaagaatttcatttagatagagagatttttatgtcggtgaactcttcaatcattttaaagatatttgataggctttatcaaaacccaaaaaatcagccagttttgaacttcaaactaaatgagacactaattttaaaagagaataagtattacgtaacggttttcaatgatatcaaaggaaaaagtttataccgtaatcgtcaggaattggttacactccctgaaagtaaaatcttaaatgagattttacagcttttcaaaggaaaagggcagttatcgggacgtgacatcttagataaactctctcaaaaagggcaagaaaatcttcttacaaaattgttggagaattgtattttacttccagctgatcaattaactattgaaggtaagcaaagtatgtcagaagcgtttctgcagaaattaaagggtatttcttcggttatgttttcaaatgaaattgagattttcgaaagaatagttgcatttgagcaagaagagttttcttgggagatatatgatcgattgacggaagaagttcataatcttgttctgtattatggcattgaaggatttgacaaatcatcgtatgtttcgatagataagcttgcttctaatactgagaatgatttagaaaaagaggttcaagttgtaaaagaacaacagaagtgtttcaatgatctatcaaaatttatttctatttttgatatttcaacacgcagtaagtatttagcctatgagatgcttcgaaaaaaatatggtggagaattcaagcctcgaaacgctcgagaaatgagtaaatttttgcgagatctatcaactacgctttttcaaagagatggctattggatggaatcatttggctatttaggagaaaagtaccagcataaaattgataatcaactcttgaagttgaagaaggaaattcttgagcaattgcttggtcaagattcgggggatggatcagaactattgatttcaaccgaattgttgaatagttcaacgaaacaattagagaaacttgttggacaaagccataaatctcgtgcttattttttacaagttagtccaagtaatcaaatagtctttaatcatatttataaaggctatggagtctaccgtagacggtttaatcattatcttccaacagatcaagaaagttatagattagatggagctttagtagatattccaatgacatttggtttcaatgcaaatattcgagaaagtacagataagaccttatccttaccattaggtgaacgagcttttgccagctctgaacaattgaactggttagatttaggttttcgactttcaaaacaatcaaaggaaatcgaagtgttcgaaaaggcaacgggtgctattatttatccacacttcttaggaagtttaataacagtcgccctcccttcattagttgcggtttttaattcaattactctcaatgattctatttattttgattttggagaattgttactcagacagaaaataaaaaatcattctcaggaaaaagtagtggtcccaagactttgctttgaaaaagttgattttatattatctcgaaaaaaatggtatcttgcttgtgaaaaattacataccattttacaggaagatacgtcaatgggtcaaaaatggttagaagttatcgagtattttgaagaagaagagttgccattatctttctttgtaaaagactttttcgagtcttataatcaggactcggagttactaaaaacaaaaccactatacatcaattttgaatcttttttaagctttaaagcatttgtaggtttggtgaagaagaaggatagaattttaatcgaagaggtcttgccagaatgtactgatacggaaacagatatgattacagagttaattgttgaaacaaatgattgagaaaagaggaggagattatggtatataaattatctgtatttatcaatgatttagctttttcaaacagtctaatcattaagatttatagttttttaaataataaagcaattaaagaaatttgggtgaagaaatcaattcagcgtggccaccatcttgaattgttttctctcaataaagagtatttgaagacaatggaagattttattgttggagaactgtcaagttattccccagttaatgttcctgaaatgaaattaaagaagcaaatcatgagtgttgcagctgcagaaaacacggaggctgacttaaatattcaaccggatgggacaattctgtttgaagaagttgaagaactatatcaagataaagttaggttaaattcctatgagactgagttggttgtggaaaagaaaaagatggagttgattctctatcttgaaagtataggattcttcaacgagcctgaaaatcagcaaaatattttattggttaaactattcttaaatttagggttactttttaataacaatttaaaaatgggttatctatctatgaagtcaaatattctattctttaacttacaactggagaagttgaagggtacaatgtcgccggagaagtataaacggtatcatcacttagttaattttctagatgagacagaacagagttatatcaatgagaatattgaaatctttctgaatgaaaataaaagttcattctataagcaatttgtagaagaactttatcaattttttagtgatgaatttgaaaaaggaaacctttattatgaaaacctaagtgatgcagagagttttgttcagaaatcacgaaagaatggtcagataacagattttcacaaaaaattctttacgaatcaagcttttctttcccatcatgcttcggaaccctttgtgatttatcgttatacagttgatgttctttatcaaattatgccgttgttaaacgttaatccgcttcgaaaacagaaaattacaaaaatggtaagtgataaggttgagacaggctatgatatgacctgggaagacagttatgctgacatgcaagaattatttaacaagaaggtacaataaatgcatattttacttgaaaatggagaaaaatatatttttgatggagtctactatagaaaattaaattcaaagactaggcacttatattttcatcagttaaaacataaccattccatttgtttagttaagagtcagcgtgtgaagtgtccgtctcttacttttgaattggtggatgtggacaatattggtgatcttcctgtattggataaaaatgattgtaagaaaatagttgaattctttgccaaaaacatgacaaaaacttttgataaagtgatggaagttagtcaaacaatgaatcagcttggatctccgactttttcagatggtatcgacacaacagtaggaaaatcaattgtaaaagtattagctgcacagttattacgcacctacttgagagagcaggggtggatagtacgagtagattttgaaaattaccctagtagaaagggacagtttttaaaagtagatctcctcgaaggcaaagatatttattgtggggtagtaaatgaatacgaacttaattactaatgactctttttttcataaaaagtatttagaaagtctggaagaaggacgtaaatatgctattttggtagtagatcacctcttctttttcaagaaagaggaaggattccttgaggattttttatatacagtttctttatacaataggactaaaacaaaaaatgtattagctagcatgttctcaacaaattaccaaaatagcgagttggagatagaaaaagcaaaacatcttatggacaggctagtctttaaaaagggacagataggagtactgtatctagaaaatcaagccctctcctatgtttgtattaagaaaaaaagaacatctcaaaccaaaagtaaaatggagcttgggactttattagataaggtcactattggtgaatcggatggctttcgagaaaaaactgtgagtgaactgtcaaaatatgcacaaggttttttagacaaaacggtagcctatcgtaaatttttcgatttagattcagattattttccaggagtgggcattgaatatgctgtaacagacaaatatacagaatgtggttatggtcgttctgcatcttttcatgattctactaatattgctctcctagaagcgattgaaagatattcctcccttttttacccctatcaaaataaagatatttatgctaagttctcagacttggacaatgctattcaccccaagaatttcattctcccatcttctgaaaaaaatccttttatgcagtaccatgataatttggagatttattggacagaggcggaatctctgagagataagaaaacagtactagtgcctgaacaattagcagtatatggagattctttctttagagataaaaagaaacagcatcgattcatatatgatagttcaaatggtgtttctttaggaggatcatttgaggaagctgtattatatggactattggagttaattgagagggataattttttaatgacatggtatggtaggattccaatcaatgaagttagactggaatctctgggcttgtctgaagatactttaaatacagttcatcgtgctcaacgagacggttttgatgtcaaagtttacgatatttcaatggagttaggagttccttctttttgggccttagtaagaagtttgaaagggcataaaatgtattcttatacagctgcagggagcaacccaatccctcataaagcagcggagtcagcattgctagaagctctggttggaattaaaatccatgataatataaacgctgaatttgggacaacggttccgactgaggttattgagatggaggatcacgtcaactattattcaagtgatcagcataaaggtgcctatgattttctgcaagattcccatgtaactgacttatcgacagaaaattacattaaagcctttaatacgaagacttatttgaaaaaactaattaataaagtattaaaagaatatgaagatatctatgtcgttaatttaacttcaaaagaaatggagaaactaggaatctatactgtgaaagttattgttccaggacttcttccaatgacttttggtgtacaaaatgaaagaatatctgaacctcgtatcaatagagaaaggagtaggagaggtcttgaggaagtgaaacagattagttgctatcctcaccctttcccttaatataatatgaaagaaactgacaaatggttgtcctaccatatcttttgccataatcttcttcatcatgaccgtatcatttgtaagttaaataaatggacctctgagaaacatctttacccttatttcttcattcgctactgggaaggggggcctcatatccgttttaggataaagaggaaagataccattcgggatgactattacaatactctcgttgacctcttagaatcggaattatctgatgagagtatcattctgacaaaagaagagtattatcaaggtcataagttagatggagagaaaattcctattgaggaattgccttggtatgagaataacactattgtcccgattacctatgttcgagagaatgagaggtacgggggaaaagaagcaattgagcatgcggaatatgttttttaccgctctagtcaattagtctcaactatgttagaaggttgtatgaactgccacatgatgattcggatgctattttatgtccatatttatgagaaagtaaatgcagcaattaaagagtgtggtataaactttgatttcccccaattctatgccaattgtttctcgtattggaatgaactttatgacttgaaagatgcagaatatataagagacattgctaatgctatcaaacactcatttgaggacaaagaagaaaaaataaatactgtcttttcatttattcagccacaaattcagaacaattttattgactctttagtagagtatttaaaaaatgtttctcaattaaagggaaacaagatgatgcgttctgtcctgttttctcaaatgcatatgttcgcgaaccgtctcggaattccgattgaatatgaatgtgccatatacagttattataaccagaaaaatacaaatttaacttgccagaagggagcataaatgaaaaaagtactgcttaatgaagaaatgtattatacgcctaactttgattatgatcaattaaagaatcgtagaaagaagtttgcaaccaatcgtatcaattggtttatgaacaatagtcctaaacaagactatcaatttcctaaagacaacccaacagattttgattccaacaaacagtatagttactatcaagaaaataatgcagatgatccgattcgaaaattatttgaaaatcgacgctcaacgcttttaaattcttttgatgggaaatggagtcgtgaagaactatttaatttattgacaatagctgttggacccaatccacgaaaaagattttatcatggagaggaattaattttaagaaactatccatctggtggagctttgtttccagtaaaactttatctttttatcaaggatgtggaaggtatggaaccgggtgtttactatattagttctcagttgaaaaaattgattaaagttgaaagcaaggaaaatctggtctgggacaatctctttccaatgactctttacaaattagacgcattgagcaattcaacagaaaaaattagttttgctgtattcatggttgttgattttaaggaatcttttaaaaaatatggagaactttccgaacgtttagctttctttgaggctggacatgttgcccaaaatcttcagttggtttcgagtcatctcaacaaaaaatcactacccatttgtggtctctttccagaagaagttgaaaaacaaattaatatccagaacaacgatagccaatattgtgtttacggtatcctatttggataaaagcaaggagaattgttatgctaataaatccattcctaacagttgaaaatcataacggtgtttattatttttctgaaaaatacggtaaaacaaaaaagccttttctaactttacaatcaaaaagagaactggctgatttgataaatgatagagagctaaataaaaaaattagtaagcatcttaattattcatttgcaattccagaacatcataaggaacttttttctatattggaagaaaatgtagcgttttgctctgagcttgttaacaaaacaatgcttgctaagttcttaatgtacagattacattctgcgacaattgaattctacaattacagtgatttgaatttgcagcatttaaaaaagatgttagagttggaaaatgggactgagagtcgagtacaagttgttatctatgacaaaaacagtcatattcaggacttccagcctacatataatcaaggattgcttctattttttgaagtatgtggtggaaaattacgtgggataggtccttttgtagaagtatcagcagatggcactaaaatgagccattttcaggaagagaaaaacgtagagagaaaagtcgagaaagaagatagttactggaatcgatcaattgaggaagttgtcttagatacagtactttcagctattacagattatttttcagattatattactgtctcttcaccttttatgtaccgtagagctatcttgaatgaagatacagtttgtctttgtgaagcattttctcgtcaatgagtttcttaagacaagatttataaattgtttggactgagggttttctcggttctttttttatggtaagttcaaaaatcagctgagcactctagaaccatcataaagtatatgagtatggaggagctcaggagtaagattattgaggaaaagacatgatttaataggattgaaaaacagtcagaccaactaatttcgtaagcttttatacgacttgtgcaaagtgaaggctgatagattttgtagcatttttccatggactaaaatatccaattcagcagtcttaaaattcctttgtcaaaccaatatcctttctagactgctacctttataaatgctctctatttcgtaacgatcaattaatcacgacatgaactttgtcctcataagttaatttaatgagaaaagcaccccaaaagttagatttatttgtctaacttttggggtgcagttcaaaaattatttgcacacggagaagataatattattttagtaactaattttttatgattattcgctctttatttctatgaaatcatcgatgtatccttttattaattctagtagtgttgtatagctgtaatttgaagataagtcaataattcctagaagttcaaggtgattttcgaaaatataattatagtcaacatccgacgttagtagtacgatttgtgcagagttctcattgtttcgaatagctttcaccatggttctgtaattgcttttttgagtaattatgataaaatatagactaagaaattcatgagagattttaatagtttttaatgggctatccatcttgcattgaatttttttctgtttacagtaatgtttgatggacaggtatagtcttagcgacgttaataactgccgaaataatttcaatatatattccttctattctatgagatttgactttattataatattttagaagaggaaatattgggtttatcaaaaacggtctgtatattgtcattaacagtcatcatttttaatagtttaggagaaaaggatgattaacatctttgttctagaagacgaaattttacagcaatctcgtattgaaaatacgataacagaagttctaacaaagcattcttggaaatgtaagggacctgagatttttgggaaaccctctcaaatgctagaagcaatagttgaacgtggttcccatcaactattctttctagatattgaaataaggggagaagagaaaaaaggattagatattgctagacaaatacgtgaacaagatccacatgccacaatcgtatttgtaacgacgcattcagagtttatgcctataacttttaaatacaaagtagctgctttagactttgttgataaagccctaggaaacgaacaatttacttatcggattgaatctattatcgagtatgccatggaaaaagaaggacaggcagtctctcaagatgcctttaagtttgaaacatctttggcacaagttcaggttccttttaataaagtattgtattttgagacttccccaacggttcacaaagtaattctacatacgacagatgaacgtcttgagttttatgcaagtatatcggaagttgaaagggcagatgaacgactatatcgttgtcataagtcttttgttgtcaatccggaaaatattgaaaaaatagataaagaacaaagaattgtttattttgatggggaccaaaattgtttaatctctcgttcaaaaatgaagggcttgaaagaacggattaaatagcaaagtataccagaaaagtaatggaaaggtcagcttatggaaatgttatttgaacatttgacatttgtcgcccacataattgttgtcttattgctgtatcaacacattagtggaaataaattcaagtggtattggtttatcatttttccaataacatttaggattcttttcctgctggttccaccactagcttattttgcctatatattcttcctgcccgtctattctctatatcgaaataagtatggtagtaggttgttggatgttttttatagtttttatcccattgtagtagaaagcttgattggacgtgtattagctttctatctgtttcctatacttggatttaaccaagttatgattaacacacattattggataaattttataatagaagtttcaatttacccactatacttctattttacgaagtttgtgaaaattgatttttacaatttacaaaaaggagttaagaaaaattatttaagccgctactttgttctcatgaatgtatcgatgtttttttacataattttgttgcaggtactggtgataggagaaggttttattccaaatgcagtagaacatcgtgaacatttagtagggatttatgttgtcatattttttgtaatgctgatttatttaaactcaactcttactgagaaattagagttagagttgctttatcaaaaaaacaaacaattagaagaattgtcagtttatagcaagcatgttgaatccttatataacgaaatcagaagcttcagacatgactatatcaatgttctgacgagtatacaagaaggaattgaacttaaagatatcgaggctatccaagaagtttatgataatgtcttgtctaagacaaaagagaatttttcaaatagtaagtacgacttcgctaatctttctaatattacgaatactgcaattaaaagtgttgtttctgccaaattgttagaagctcaaagtaagaacgtagaagtgcatatcgaagttgaaagcctagtaagtctttccaacatggacgctttggatataataacgatattatctattcttttagataatgctatcgaagcagcctgcttggcagaaaagccatgtttaactttggctattttccaagaaaaagatagtgatattattgttgtagaaaactctattcgagaagaaaaaatcaatatttctaaaatctttgacctggggtactcttcaaaaggagagaataggggaattggattatcaaacgtgcatgacattttggataaatatcctgcggcctttattaaaacaagtagccgaaaacatttatttagacaaactattgaaatcaaaagagtttgttaactttagtgagttagtgtcaggaattgcctagacgtaactaattgtaagtccactaaaaagtgaacttggtagttaaaataaaaaaggaggaatctatcttatatttgggtaggttcctccttttaagtttctttggctcttagtcaactgtagtgagtgacgaaaagctatcaataaagagctaaaaaaactagggccattgccctagttgtaaggaggttagttcacatcttggtttataggagattatgatgtgaactggattggattaggagtctctgtttctgttaggaggattagagactgaaaggattaattttcgagtgtagtttcatcgaactacaagaaaattatagcagtttatgagaaaggacacaatggacttagggggggtcacatctcttattattagagaattaggttagtagaatttgatggatccgtaaaagagcttactacgcaatctgtggagaaaaaatcagatatgttattacaggcagttttgaggaacgatcaaggaagctctgtcttaaacataaagaaatactttaataggttatatttttatagtgaacctaccatcatggagtgctataatgtcaatcgaagagaatagtcttaatgacataatgtatccaacaacaatacctcattatctctcttcattgtagtcttttgttattcaaagaggtagaattatgaattatgtagctagaatcaacttaaaaacgggtacatcctatcgtaacgaattaattgatttttgtttaaaaggagaacaacagtatttggctattggttggagtcgaatatatggtgagggagaagtattaacttattctgaattttatgaacgacttcgtcaagagcctggtcgattaaatactgtgctgaatatttttaagaatacacatgaagataatttgttttggacacgtgatttagatggtaattattggatatgtagagctaaaggcgaggtgcttacaaggtgtaataaaaggttagacgtaggagcacttttaccgatagatgcttataaatttggtatgcaagtgccaggacaaatcaaggcagcattcaacagagctaatgctggaacggcacagaaaatttatgatgctattatagttgagtactcaaaagctatttataataaactctctcaaacgaatcactatgaggttgctcgtttagaaggtagtttattggataacctgcctgattttgatttggaagagctagtgatttcctatatacaggtaaattatgactattatgttctttcgaattctattgcaagcaaatcgacgacaataaaagtagaatgcgagtttttatctagagatcctaaacgggtgagaaaggcagttgttcaagtaaagggtagaaaagccgaagcacttgatgcattacaatttgaagattttacccagaatggttacgaggtgttcctctttgcaccagaagtattaaatgctgataaggtggataatattgtcgttattacgccaaatgaattaattgacttttacgagaattataaagtaatacttccagactccatcacacagtgggagaatttatactaatctagtttactatttgtgaatcttcaattatgagtaatgattgaactcattttctttgacacatatggcactattaggtacttgatgttagtctgatttcctagacacgttttggtaggataatatcaacccaaagagatatctaagagttacaaaaatatactaaagaattcaaagaaaccattacttaattgcatgagtcaggaaagccagtctcagagcttgttaaggatgggattgaatagccacaagctcttttatagggaagaagtaactcgtctctaatgatttacaacaagggaaggagaataattggaaacaatcaaagataacttgaagcgttgtgatgcattttataaaagcgatttttaccaatttctagagaaacatcatccaaactatattgcgaatatttttgaccacttatgtgaggatccagatgctggagatgttagtttataccaagatttaagcaataaatttcaattatcggctagaaaagatcacttgatagatgtagttgaaggacggaagattcgactcgcagccgatataatttgtggtagaaagcaaattgccgattttcataacaatgattatgaaaagtggagaaaagattatgagcttgttcgttctaatttaaaccttcattttttgtggcctaagcataagcctccaacgattaatacttatcgctacactaaatatttagatagaattgattatttactttttgatttaaaatgttattttaaaggacaagagaatcaagagaatctgaatactccgatgaaggatgcctatgaaagtgaagaaacagcgatttggttagggcagtttaatagagatttcaagtactttattgataaaatgaagttacaggcatttgttaatgacaactatgatgttttagatatcagtacaggtcaaactgagattatacaaggtatcatttctctaaaagagatatcagagacactaaatctatatatggaaaatctattaaggttaaatagccaaaatgtctttaataaagagtgtcccccaacccaagattaatgtgatgatatttatgtgttaaaaaattaagctaggaagttaagaatatggaaatcaaaaatcactttggtgtatatggtatttgttttgagaatgggaaattgctatgcattgagaaaacgagaggaccttatcagcatcgttttgatttaccgggtggtagtcaagaactaggtgagggactgacagaaaccctcgaacgagaggttctagaagagacgggctatacgcttagccgttattcaaatcctaggatttatgatgtaatggttcaagaaggtgggcaagacttcgcagtacatcacatcatggccttttatgatatcgtgctcgattttgagcgctctcaaaaatcccttcctcaagaggttcttgatggaagcaatgattcagcaaatgcaatttgggttcctttcgagcagattaccgaagaaaatgcctcacccttagtattgaaggtgaaggcagagttagtaggaattccagaattacaactgacaagctatagaaattggaaggtaaaagtaaagaaggagaacacacgacacctctagagatgaggaatgccaaaaagcaaatcaaaccctctattttgtgttacacaacttattttatattacccgaagacttggaatatgagatttatattgatttaaagcttgtttcggagtatattttagatgatacaatttttatacaccctcaaattaagagtctcaaaaggtgaaatatggttatggatacttcaaatgataaatataaattaacaaaaactcgtgattacgaagataaagaaggaaaaactaaagacatggaatccaattcacaagcttcaacgacagagcctcatattaatagttattcagaactcttattatctgtaaaaaatttagtatttcgtggggcaccaggaactggaaaaacgtatctttctaagcaaattgcagcgaacattgtttctaatggtagaacgagtgagataagtcagttgtcagaggaggaaatgaaccaaattgattttgtccaatttcatccttcatatgattatactgactttgttgaaggcttccgtccttcggaagttgaaaataatcaaattggttttactctaaaaccaggaaagtttaaaagatttattgcaaaagctcaaaaagttgagacggttgatcggcaagataattttgctcaagcatgggaaaaattttttgaggcagtgactgaagctgaagaaacatctcaaggatataatgaactgaaaacattgacgggtaagccaatgacaaatatggtgtcttatgataacaatggtgtgcaaggaatctataaaaaagatacaaaacagtatcttaattataatcaaatatataatgtttatagaggtttgcctggggttcccgagggtggatttgatacctatagaaaagcagttgttaagcacttgaaagaaaaatttggcctaaaggattatgttgctggtgaagaaaaaaatgataaagataagtttgtttttatcattgatgaaatcaaccgtggtgagatctcgaagatttttggagagttatttttctctgttgatcctgactatagaggaattaaaggtgcagtaaatacacagtataactctaaggaaaaattatatatacctgaaaatgtttatattattgggacaatgaatgacattgaccgatcagttgaaaccttcgatttcgcaatgagaaggagattcacctttgttgaagttactgccgaggagtcggctcaaaatatgcaccttaatgatgaaacgaaaagaatcatgtacagattaaataatgcaattattgaggagggccatttaaatcaagactatcagattggtgcaagttacttcaagggtcttgataaaggaacaatttcaatagaaaatttatgggactacaagttaaacccgttattaaaggattattttcgtggtgagagattagctgatgaaaagatgaaagctttggaaaaagcttactttggtactagtgaggactagtctatgatcaaaattagtgataacacagaaattacactaagtgagataaatcatccggttattaatgaattaacgaataaatccttgtcaactttggatcaagaaaggtttattatctttccgccattattaaaggattctgatgacttagatgagggtaattgtatctttcgcacatttaatggtaaaacgaggacttgtaatatagtaggttttctaagtgatgggaataatgaaatttatattcatagtcgtttttttgaaacggaagatgaagattattttctagattacatgttgcaaaaagtacttcattacaatgttacggtaaacgaaattgcatcttcagaagaaaccacctattatgatttattagtctacttgtttccttactatttggaggaggctatgcgaaagggactatataaggagtatgcttctcattcttataatgatagtaatgttcgaggtcagatggatatcaatcgtcattttaaggagaatgtgccttttgtcggtaaagttgcttacaatacacgggagttttcattcgataataaaataaatcaattgattcgtcataccattgaaaaaatcgaaattacaaaaccatttttacttgaagaaaacccagttgttcaaaaaaatgtaaagatgataaaggaaataaccccaagttactctcattatgaactggaaaaagtgttatatgagaatataagtaataccataaaacatggattttttgaagaatacacacagttacagacgttgtgtcttaaaattttgacggatgagagaattagttacggagcatccagtcagaaagtacatggtatcgttattgatattgcttggttgtgggaagaatatctaaacttattgattaaagaacacttttatcatcctcaaaataagttaggtaccatggctcattattattttcaaaatggtaatggtaaaatttatcccgatttcatagggagagatgtaactaatagagttattgcagatgcaaaatataaaccagagaagaatataaagagcagcgactattctcaaattttgtcgtatatgtttcgatttgacagtaaattagcgtactttttacatcctacaaaagaagaatcacaaagtatattttatttaatggagggagtaagtgcggaacatactccccaaaaaagaatggatatacgagtagaaaaaataggtttgaagattccacgagcgacaagttattcggaatttgttatgttgatggaagaaagcgagaagagttttctgactaaattgaaacgttgaaagtttccttattcttagcacgttaatatttaggaggacaaatagcttatcgattaatgttaacttgctatcttctaatatgtttgctatactaatgtcataaattatttaatttatatctttattcaccacacctctaacggtgaacctttggtcacgtgactaaagaaaacagaaatatggaggaggagatgctattgctggttctgtcctagcaataggcatcccatgtttgattgggttaaaagggagcgtactcgcttttagctatcagttaagccatcagacagaagaagaggcttaacgctttgaaacacgtacgagataatttgcctaattgattgaaaggctacaacaaacgttattagcaactaagcataacgagaagtttttcctatggttttccataggcacgcgcaaccttgttttttgagacaaggcttgtcggcttctttgttatgctttttttgttttgagtttgggtagatggacaaaaaaggaaggcgacatctcgatgaatagggcagaggaacaggtgttcccaactctaaactatcggcatgcggaggaaagactacgaacaggtgtttgagactttccaaggttactttacaacaacaattttttaaaggagaaaagcttatgcttaacaaagtcattattactggtcgtttggtcgcagatccggaacttcgctacacaccttctaacaaggcggtagcaacggctcgaatcgcctctccacgtgattttaaaaatcaaaacggagaacgagagaccgattttattaacctcgtcatttggggtaaatatgcagagaatttctcaacttggatcaagaagggatatcttgtgacagttgagggacggttacaaactcgttcttatgaaaaccaacaaggtcaaaaggtctatgtgactgaggttaatgtgtcaaactttgacaacttacagcctcgtgaccatagtaacacttcttcgcaaagtcaagattttggacctgcagaagggggctttcctggaggtggagaacctctagatgattctatgtttgagaatattcctttctagtacatagttcaaggttttaagaagaaagtagagagttcagttatactgagctctttttgttttggaaggagaaagaatgataaaagaagtagagatacttcctccattgacagaggataattactaccaagataggtattatatgtccacttctcgtctgaaggagtacatcaaatgtcccttaaggcaggaagttgtcgatttgggcttttggcctgagaagacggagacagaaagcctacttgttggtaattatgtccattcttattttgacactaaagaagctcatgaagctttcttggaaatgaatcgagataagatcattagtcaacgaggaaaaactgctggccaggtaaaagcctctttcaaacaagcagataagatgattgctgctttagaaaaagaggagctttttaatcgtttgtatcatggtacagatgatgaactggtggagaaagaacggattatcactggtacgttagaagggattcccttcaaatgcaaaattgatagtctgaatctttcaggaggctatttcgttgacctgaagacgatggagagtcttcagtcagaaaaatattcgacgacacttcatcgttttacgaagtctcttctctataacattgtagaatatcagtatacgctacaaatgtacgtatatcaggagttgctgaagcaaacctacggttatgagtttacaccatatattatggcagtttcaaaggaacctgttcccgataaggagttaattctaatcgatgatactatcattgaaatggggagagacatcttctatggacatgttgaagcacttaaagatgctttggcacataagtctgtcgaaggatgtggtcattgtgattactgtttaacgaataagtcgttagttacagcaaaaacagtggcagaatttttacaacaataataaataggaaataaagtggtcaaaagaccactttttatattaaggagaaaagaacaatgactgaaacaattgcaaacacaaatgaaaaaaacctagtagctgaactaattgaagctaaagtggctcttgctaaggctgaaatgcaattagaatggcaaaaggctgaacaagtaaaaaaagaccattctaaaccggagccagagcttatggctccactgtttgaggctttggccaaggctcaagctgagttcgagtctgtaacagcaacaagtagagtcacgtttaagaacgtggactttaagttcgcccctctctcagagattttaggggctgtacgtccagcacttaacaagtacggcctgacattgacgcaacaaaccaaacatattccgtttggtaatgccaatggaatcaaagttgtgacgacactacttcatgaaagtggtgtctcttacgacattgagtcggttcctgtattctataatgtcaatgacattaagaacctaggagctcaagtaacctatctgcgacgctacgaggtgaaaaccttgctgggtattgaggctgatagcgaagaactagatatggacaatgtgccaaatcattcgcaatcagctcaacagacttgtaattatgatggtaaccataattatcaatcaaatgcccaaacgaaaacacctcgcaagccaacaggtgcccgctatggaaagactgctcagtcagcgtcgcctgctacttctttgagtagcagtgaacagacatcacttagtgaggtgacatcagataacaaagtggcaagtgatagtgtctcacaagcaactagcgagtctgaagtagctccacaaaagagtgaaacagctacaaaagggataaaagctgcttgtaacgatgatcaactgattcaaatggttgctcgtggtgaagaagctgcattgtctcttggagcaacagaaagccagttgcttgagtggtctcagctaggagaaagccaagggttgactgttcaactcaaagctttatctgattttgtttctaaacaacgtcagcaggcacaacaacaatagtagtagaacaaaaagtggtcagactttattacggcaacaaaataagagaaatgttaattagaggcgtttacctgatcggcattaattgaacattatccagagggtagaactatccctgggtaagaaggagtatgatataataggataagaattatgcaacatgatattataacgactaaggtaggaatgggtatgcaaaatattaatgatctttttgaagcatatatagcagaagaggaccctattaagaaggcgtttttgctaaatatgtacaaccatgctttgcaacagaaacaaaaagaggtgattagtcgtgactttgtcagataaacaatcaccagtattttagatcttttccattcaaaccgaacatatgtcgaacaacaagtttggtacactttctttaaacagacacttccagagctgttgtttattggggttgtggcctttctaggctatttttccctatgcaacttgcttcgcaacaaattggtttttaaactattagttgccgtagtatttctaatccctattcttttgatagaagggattcaacacttctttcgtagttgaacaaaggaaggagacgtctattattaatatactgtgttttttagagggtgcccacaagccaaaaaaacataggcaatgtatggctaaagtgtgtacttatctaaagaacgatgggcataaggttcgagtagggtatgtttcactagcaggtcttgaagctttggataacagaggagtcaattcaatgagtgaagccgttcccggaaaaagagtctggttaatcgtttatgatgaaaatcgtccctgtaagtcctatacaaatgaagatattcattactataaggaatttgtggatttgttttcgtcacgtctgaaacgtaggctttattacgaaggcatgcttaacgaactgacagccctcaaaacaagaacagaaaaatggtcctaggggccattttttgttttataaaggagaaaaaacaatgacaaaaagagaaaaagccttgtggttacacgagcactacaagaactactcccttaaatggtacctagagaatgatgccagattaaatgcgatgtttaggaaagtttatcatcgctatatgactgacctcaatgcacgcgcttcgaaagcgcaattgtctcatattgaggacctaggcaaacgtatgagagaagtatacgaagatgtctatggtactaattttgatagcgattgtcgcttagaccgtgcagagacgaatcgaaaggtgcaagctatccgcgctatgtgggtagtagcgccagcctaggacgaggtagttatggatagaattatgattttgaccaatacgctacctcacgaaagtaacatttcggttatctataagggtgacgttgctgttgtagttgcaagagataaccaggagcgtttgctttttaaagtaaccacaaccgtagcagtcgctatgcaactgcaggcaaaatggcttgtggtttaagaggtaaaggagaaaaacaatgacagaaacaattactaggagacaagtaagacatcctaaagactttggtgatagagagctattcaaaagggctttcactcactggattccttcggaaaaggtcgatgccttgtattctgaattgcaaggagattttaagaaggtctgtgagttaagtatcgaggagttaaaacattatggcttaactcagagagatgctattgcctttctttcaatgcttgaacttttcaaacgttcagaaggtgaggaagaaaagccaacttgtgtcactgggactggatattttgctcaaagtatccaaaaagcctatggacataagaaacaagagcatcttgtagtgtggtacttggatgtgcattataacgttatcgaggagcgagtagttttcatcggtagcgttcatcgtagtatggcatgtccaagagagattttacactatgcagtgaagaatttagctcgctacgtgctggtagctcataaccatccctctggaagtgtatatccttccagtaatgatattaatgttactgaggcccttgaagatgctgcaaaactctttgagatggaggtcttagaccatgttatcgtaacgaaggataattactattcttttagagataacggaagaatgcgttgtttctaggaaaggagaaaaagaatgggaaatatttctgatgcctttggaaaggtaactatttccgcaccaacattttcagatattgaggtgcttgtggctactcatagggtaatcaatgccaaagcttggaccccaacgactctaaaaggtcatccaagaaaagcagattgtatcacaactgaagaaggacttgtctcagtgacacttccttttacagcttgtgggaattggaatattcgagagaatatcgatagctttttgccttacatcttaaagcaagatagcactcttagtgatatcccagtgtcagtcacatttgattatgtggatgcagagtctggcgtaaactttatttataaagcaaccgttatgactcgcaatgtcccaggtaaaggggtaaccactgaactcttaatagatgaagaccttggagattattcagagtcttatctaaaagagctagaggaagcctatgaccaagagcttgctttaggccgactgtctatctaaaaatggtgttataataggtataaagaaaaagatgtagcgaggagacaaagcatgaaagagaccttcttttggacctttagttcagatgagatttcgaccttatctgatttgacgtcagaaggttttgaagtcgattggacggtaaggagttcatctgatgctatgaccagtggttttgtgattcaaggggagatttctggaatgattgagttcactccagaacctagagatgcttacacctttgttcataagctagaggttcgtatggacaagaaaaaccaggggatagcagggcgtttgttagcacatgttgcccaagatgctttcaatcgtggttttgagggggtcatgatgtgtctttcaaagactgctcttttagattactacgtgcgtcgctatggttgcagtcgtattgcaaacaccaatcgtgtgatgtttcatacggcagcatgccagttgcttattgaccgatttttgaagggaggcgaaagctaaccatgaggatagttgaacaatttaagtcagactggaagtcttcaggtttaccgaataaaccttacaagacaccagaggagattgaaatgattaagaatgggaatcttgtctgggctgcgcgtgttgaagaaaaattggggcgtaagttaagcccacgagaacttgatgaaatgcagtggtgagttactgctataaatagtgtatcgtgcaagatacatcgcatatttgatatataagagaaagaggaaggtattagccctaggctacaccttcctctttttctatggaggagaaaaacaatgacaaaacaaattttcgtttataaaaacaaaaaaacacaggaagtctttgcagatctttttgccaaagatcttcttgaaggcgttacaactttccctcggattgataacgcacaatcctgttcattcttggaactctcttgtctttatctcaagagaattttagaaatgaagcatcgtagggttcaaaccctattcgttgagggaaaacccgaaccagcacttgcttcagcattgttacaagcacgtgctatgggactgaatgttgtcatcaaattgaagacaactgaaagcaatagcgagacacaagaagagttcaaggagctcggtcttgacgatgttgtaatcgcttgacctgaataaaaaaggagaaaacaatgacaatcactcaaggactctattatattgaaaaggttcaccaatataatagtaatattgctggctttccgtcagacctaattgatgaccggattgcgtcgattattgatagcaacaaggcggatatgcaacaaagtttgctatgccgaccagttaggaacgtggttttgaatagagagggagtatctaacc

SEQ ID NO: 16 - protein, 8 aa, Streptococcus salivarius
GWFTAVQL
